(19) United States
(12) Patent Application Publication
(10) Pub. No.: US 2025/0263681 A1
(43) Pub. Date: Aug. 21, 2025

(54) LIPID NANOPARTICLES FOR GENE EDITING SYSTEMS

(71) Applicant: ORTHOBIO THERAPEUTICS, INC., Vail, CO (US)

(72) Inventors: Peter J. Millet, Edwards, CO (US); Matthew Allen, Swaffham Bulbeck, Cambs (GB); George Gentsch, Cambridge (GB)

(21) Appl. No.: 18/856,005

(22) PCT Filed: Apr. 12, 2023
(86) PCT No.: PCT/US2023/065691

§ 371 Date: Oct. 10, 2024

Related U.S. Application Data
(60) Provisional application No. 63/362,858, filed on Apr. 12, 2022.
(60) Provisional application No. 63/334,476, filed on Apr. 25, 2022.
(60) Provisional application No. 63/342,471, filed on May 16, 2022.
(60) Provisional application No. 63/495,461, filed on Apr. 11, 2023.

(51) Int. Cl. C12N 9/22; C12N 15/11

(52) U.S. Cl. CPC C12N 9/226; C12N 15/111; C12N 2310/20

(57) ABSTRACT

The present disclosure provides compositions and methods for treating and preventing localized nociception, inflammation, or morphological changes associated with joint disease or illness, back or spine conditions or disorders, and musculoskeletal diseases or dysfunction with an LNP-encapsulated CRISPR/Cas9 gene editing system.

### CROSS REFERENCE TO RELATED APPLICATIONS

[0001] This application claims priority to U.S. Provisional Patent Application No. 63/334,476, filed Apr. 25, 2022, U.S. Provisional Patent Application No. 63/362,858, filed Apr. 12, 2022, U.S. Provisional Patent Application No. 63/342,471, filed May 16, 2022, and U.S. Provisional Patent Application No. 63/495,461, filed Apr. 11, 2023, the contents of which are hereby incorporated by reference herein, in their entireties, for all purposes.

### BACKGROUND OF THE DISCLOSURE

### Joint Disorders

[0002] Treatment of osteoarthritis, degenerative joint disease, and other joint dysfunction is complex and there are few long term options for either symptomatic relief or restoring joint function. Osteoarthritis (OA) is the leading cause of disability due to pain. Neogi, Osteoarthritis Cartilage 2013; 21:1145-53. All mammal species are affected: working animals, domestic pets, and their owners all suffer OA-related discomfort, pain, and disability, depending on the degree of disease progression.

[0003] OA is a complex disease characterized by a progressive course of disability. Systemic inflammation is associated with OA and with OA disease progression. Inflammation is driven by increased levels of pro-inflammatory cytokines. New methods and compositions to treat this disease are acutely needed. Disclosed herein are compositions and methods useful for treating OA as well as other inflammatory joint disorders.

### Back and Spine Disorders

[0004] Back or spine conditions or disorders, including low back pain, and pain or inflammation associated with discogenic disorders e.g., degenerative disc disease (DDD) or internal disc disruption (IDD), is a major cause of morbidity and disability worldwide for which few long-term options for amelioration currently exist. Andersson GB. Epidemiological features of chronic low-back pain. Lancet. 1999; 354:581-585. Presently available treatments include surgical or less invasive options that often fail to offer long-term palliation. Ju, et al. Global Spine Journal (2020): 2192568220963058. All vertebrate species are affected by back or spine conditions or disorders, including working animals, domestic pets, and their owners. All suffer from the associated discomfort, pain, and disability, depending on the degree of disease progression.

[0005] Back or spine conditions or disorders, such as low back pain, are complex diseases characterized by a multitude of inputs contributing to a progressive course of disability. Among these contributors are morphological irregularities (e.g., disc disruptions), inflammation, and changes in the localized cellular environment (e.g., vascularization and/or innervation). Peng, Bao-Gan. World Journal of Orthopedics 4.2 (2013): 42. Each contributing factor is driven by differential expression of various gene products, including at least pro-inflammatory cytokines, growth factors and other effector biomolecules. New methods and compositions to treat this disease are acutely needed.

### BRIEF SUMMARY OF THE DISCLOSURE

[0006] Provided herein are compositions and methods for treating synovial joint dysfunction, are described herein. In addition, compositions, and methods for treating or preventing localized nociception, inflammation, or morphological changes associated with back or spine conditions or disorders, are disclosed herein. Further, compositions and methods for the treating or preventing musculoskeletal disease and dysfunction, including fibrosis and/or scarring in, for example, post-operative subjects are herein described. Additionally, methods for gene-editing cells, including, but not limited to synovial cells and/or synoviocytes, chondrocytes, synovial macrophages, and synovial fibroblasts, and uses of gene-edited synovial cells and/or synoviocytes, chondrocytes, synovial macrophages, and synovial fibroblasts, in the treatment of diseases such as osteoarthritis are disclosed herein.

### BRIEF DESCRIPTION OF THE DRAWINGS

[0007] The presently disclosed embodiments will be further explained with reference to the attached drawings. The drawings shown are not necessarily to scale, with emphasis instead generally being placed upon illustrating the principles of the presently disclosed embodiments.

[0008] FIG. 1 illustrates SEQ ID NOs: 1-48, the crRNA sequences generated by the bioinformatic methods herein described that target human ADAM17 to modify and/or ablate expression of its encoded products. Additional information includes the chromosomal genomic coordinates (assembly hg38) of the edit site and a score, summarizing several predicted performance metrics.

[0009] FIG. 2 illustrates SEQ ID NOs: 49-96, the crRNA sequences generated by the bioinformatic methods herein described that target human ADAMTS1 to modify and/or ablate expression of its encoded products. Additional information includes the chromosomal genomic coordinates (assembly hg38) of the edit site and a score, summarizing several predicted performance metrics.

[0010] FIG. 3 illustrates SEQ ID NOs: 97-144, the crRNA sequences generated by the bioinformatic methods herein described that target human ADAMTS5 to modify and/or ablate expression of its encoded products. Additional information includes the chromosomal genomic coordinates (assembly hg38) of the edit site and a score, summarizing several predicted performance metrics.

[0011] FIG. 4 illustrates SEQ ID NOs: 145-192, the crRNA sequences generated by the bioinformatic methods herein described that target human ADM to modify and/or ablate expression of its encoded products. Additional information includes the chromosomal genomic coordinates (assembly hg38) of the edit site and a score, summarizing several predicted performance metrics.

[0012] FIG. 5 illustrates SEQ ID NOs: 193-240, the crRNA sequences generated by the bioinformatic methods herein described that target human ATP1A1 to modify and/or ablate expression of its encoded products. Additional information includes the chromosomal genomic coordinates (assembly hg38) of the edit site and a score, summarizing several predicted performance metrics.

[0013] FIG. 6 illustrates SEQ ID NOs: 241-281, the crRNA sequences generated by the bioinformatic methods herein described that target human BDNF to modify and/or ablate expression of its encoded products. Additional information includes the chromosomal genomic coordinates (assembly hg38) of the edit site and a score, summarizing several predicted performance metrics.

[0014] FIG. 7 illustrates SEQ ID NOs: 282-301, the crRNA sequences generated by the bioinformatic methods herein described that target human CALCA to modify and/or ablate expression of its encoded products. Additional information includes the chromosomal genomic coordinates (assembly hg38) of the edit site and a score, summarizing several predicted performance metrics.

[0015] FIG. 8 illustrates SEQ ID NOs: 302-318, the crRNA sequences generated by the bioinformatic methods herein described that target human CALCB to modify and/or ablate expression of its encoded products. Additional information includes the chromosomal genomic coordinates (assembly hg38) of the edit site and a score, summarizing several predicted performance metrics.

[0016] FIG. 9 illustrates SEQ ID NOs: 319-340, the crRNA sequences generated by the bioinformatic methods herein described that target human CALCRL to modify and/or ablate expression of its encoded products. Additional information includes the chromosomal genomic coordinates (assembly hg38) of the edit site and a score, summarizing several predicted performance metrics.

[0017] FIG. 10 illustrates SEQ ID NOs: 341-357, the crRNA sequences generated by the bioinformatic methods herein described that target human CCL2 to modify and/or ablate expression of its encoded products. Additional information includes the chromosomal genomic coordinates (assembly hg38) of the edit site and a score, summarizing several predicted performance metrics.

[0018] FIG. 11 illustrates SEQ ID NOs: 358-374, the crRNA sequences generated by the bioinformatic methods herein described that target human CCL3 to modify and/or ablate expression of its encoded products. Additional information includes the chromosomal genomic coordinates (assembly hg38) of the edit site and a score, summarizing several predicted performance metrics.

[0019] FIG. 12 illustrates SEQ ID NOs: 375-391, the crRNA sequences generated by the bioinformatic methods herein described that target human CCL5 to modify and/or ablate expression of its encoded products. Additional information includes the chromosomal genomic coordinates (assembly hg38) of the edit site and a score, summarizing several predicted performance metrics.

[0020] FIG. 13 illustrates SEQ ID NOs: 392-408, the crRNA sequences generated by the bioinformatic methods herein described that target human CCL7 to modify and/or ablate expression of its encoded products. Additional information includes the chromosomal genomic coordinates (assembly hg38) of the edit site and a score, summarizing several predicted performance metrics.

[0021] FIG. 14 illustrates SEQ ID NOs: 409-425, the crRNA sequences generated by the bioinformatic methods herein described that target human CCL20 to modify and/or ablate expression of its encoded products. Additional information includes the chromosomal genomic coordinates (assembly hg38) of the edit site and a score, summarizing several predicted performance metrics.

[0022] FIG. 15 illustrates SEQ ID NOs: 426-473, the crRNA sequences generated by the bioinformatic methods herein described that target human CCN2 to modify and/or ablate expression of its encoded products. Additional information includes the chromosomal genomic coordinates (assembly hg38) of the edit site and a score, summarizing several predicted performance metrics.

[0023] FIG. 16 illustrates SEQ ID NOs: 474-517, the crRNA sequences generated by the bioinformatic methods herein described that target human CCR7 to modify and/or ablate expression of its encoded products. Additional information includes the chromosomal genomic coordinates (assembly hg38) of the edit site and a score, summarizing several predicted performance metrics.

[0024] FIG. 17 illustrates SEQ ID NOs: 518-534, the crRNA sequences generated by the bioinformatic methods herein described that target human CRCP to modify and/or ablate expression of its encoded products. Additional information includes the chromosomal genomic coordinates (assembly hg38) of the edit site and a score, summarizing several predicted performance metrics.

[0025] FIG. 18 illustrates SEQ ID NOs: 535-551, the crRNA sequences generated by the bioinformatic methods herein described that target human CXCL1 to modify and/or ablate expression of its encoded products. Additional information includes the chromosomal genomic coordinates (assembly hg38) of the edit site and a score, summarizing several predicted performance metrics.

[0026] FIG. 19 illustrates SEQ ID NOs: 552-568, the crRNA sequences generated by the bioinformatic methods herein described that target human CXCL2 to modify and/or ablate expression of its encoded products. Additional information includes the chromosomal genomic coordinates (assembly hg38) of the edit site and a score, summarizing several predicted performance metrics.

[0027] FIG. 20 illustrates SEQ ID NOs: 569-585, the crRNA sequences generated by the bioinformatic methods herein described that target human CXCL3 to modify and/or ablate expression of its encoded products. Additional information includes the chromosomal genomic coordinates (assembly hg38) of the edit site and a score, summarizing several predicted performance metrics.

[0028] FIG. 21 illustrates SEQ ID NOs: 586-602, the crRNA sequences generated by the bioinformatic methods herein described that target human CXCL5 to modify and/or ablate expression of its encoded products. Additional information includes the chromosomal genomic coordinates (assembly hg38) of the edit site and a score, summarizing several predicted performance metrics.

[0029] FIG. 22 illustrates SEQ ID NOs: 603-619, the crRNA sequences generated by the bioinformatic methods herein described that target human CXCL6 to modify and/or ablate expression of its encoded products. Additional information includes the chromosomal genomic coordinates (assembly hg38) of the edit site and a score, summarizing several predicted performance metrics.

[0030] FIG. 23 illustrates SEQ ID NOs: 620-636, the crRNA sequences generated by the bioinformatic methods herein described that target human CXCL8 to modify and/or ablate expression of its encoded products. Additional information includes the chromosomal genomic coordinates (assembly hg38) of the edit site and a score, summarizing several predicted performance metrics.

[0031] FIG. 24 illustrates SEQ ID NOs: 637-655, the crRNA sequences generated by the bioinformatic methods herein described that target human CXCR1 to modify and/or ablate expression of its encoded products. Additional information includes the chromosomal genomic coordinates (assembly hg38) of the edit site and a score, summarizing several predicted performance metrics.

[0032] FIG. 25 illustrates SEQ ID NOs: 656-672, the crRNA sequences generated by the bioinformatic methods herein described that target human CXCR2 to modify and/or ablate expression of its encoded products. Additional information includes the chromosomal genomic coordinates (assembly hg38) of the edit site and a score, summarizing several predicted performance metrics.

[0033] FIG. 26 illustrates SEQ ID NOs: 673-720, the crRNA sequences generated by the bioinformatic methods herein described that target human FGF2 to modify and/or ablate expression of its encoded products. Additional information includes the chromosomal genomic coordinates (assembly hg38) of the edit site and a score, summarizing several predicted performance metrics.

[0034] FIG. 27 illustrates SEQ ID NOs: 721-768, the crRNA sequences generated by the bioinformatic methods herein described that target human FGFR1 to modify and/or ablate expression of its encoded products. Additional information includes the chromosomal genomic coordinates (assembly hg38) of the edit site and a score, summarizing several predicted performance metrics.

[0035] FIG. 28 illustrates SEQ ID NOs: 769-786, the crRNA sequences generated by the bioinformatic methods herein described that target human IL1A to modify and/or ablate expression of its encoded products. Additional information includes the chromosomal genomic coordinates (assembly hg38) of the edit site and a score, summarizing several predicted performance metrics.

[0036] FIG. 29 illustrates SEQ ID NOs: 787-805, the crRNA sequences generated by the bioinformatic methods herein described that target human IL1B to modify and/or ablate expression of its encoded products. Additional information includes the chromosomal genomic coordinates (assembly hg38) of the edit site and a score, summarizing several predicted performance metrics.

[0037] FIG. 30 illustrates SEQ ID NOs: 806-839, the crRNA sequences generated by the bioinformatic methods herein described that target human IL1R1 to modify and/or ablate expression of its encoded products. Additional information includes the chromosomal genomic coordinates (assembly hg38) of the edit site and a score, summarizing several predicted performance metrics.

[0038] FIG. 31 illustrates SEQ ID NOs: 840-887, the crRNA sequences generated by the bioinformatic methods herein described that target human IL1RAP to modify and/or ablate expression of its encoded products. Additional information includes the chromosomal genomic coordinates (assembly hg38) of the edit site and a score, summarizing several predicted performance metrics.

[0039] FIG. 32 illustrates SEQ ID NOs: 888-911, the crRNA sequences generated by the bioinformatic methods herein described that target human IL4 to modify and/or ablate expression of its encoded products. Additional information includes the chromosomal genomic coordinates (assembly hg38) of the edit site and a score, summarizing several predicted performance metrics.

[0040] FIG. 33 illustrates SEQ ID NOs: 912-928, the crRNA sequences generated by the bioinformatic methods herein described that target human IL6 to modify and/or ablate expression of its encoded products. Additional information includes the chromosomal genomic coordinates (assembly hg38) of the edit site and a score, summarizing several predicted performance metrics.

[0041] FIG. 34 illustrates SEQ ID NOs: 929-963, the crRNA sequences generated by the bioinformatic methods herein described that target human IL6R to modify and/or ablate expression of its encoded products. Additional information includes the chromosomal genomic coordinates (assembly hg38) of the edit site and a score, summarizing several predicted performance metrics.

[0042] FIG. 35 illustrates SEQ ID NOs: 964-990, the crRNA sequences generated by the bioinformatic methods herein described that target human IL6ST to modify and/or ablate expression of its encoded products. Additional information includes the chromosomal genomic coordinates (assembly hg38) of the edit site and a score, summarizing several predicted performance metrics.

[0043] FIG. 36 illustrates SEQ ID NOs: 991-1007, the crRNA sequences generated by the bioinformatic methods herein described that target human IL10 to modify and/or ablate expression of its encoded products. Additional information includes the chromosomal genomic coordinates (assembly hg38) of the edit site and a score, summarizing several predicted performance metrics.

[0044] FIG. 37 illustrates SEQ ID NOs: 1008-1055, the crRNA sequences generated by the bioinformatic methods herein described that target human IL10RA to modify and/or ablate expression of its encoded products. Additional information includes the chromosomal genomic coordinates (assembly hg38) of the edit site and a score, summarizing several predicted performance metrics.

[0045] FIG. 38 illustrates SEQ ID NOs: 1056-1082, the crRNA sequences generated by the bioinformatic methods herein described that target human IL10RB to modify and/or ablate expression of its encoded products. Additional information includes the chromosomal genomic coordinates (assembly hg38) of the edit site and a score, summarizing several predicted performance metrics.

[0046] FIG. 39 illustrates SEQ ID NOs: 1083-1104, the crRNA sequences generated by the bioinformatic methods herein described that target human IL13 to modify and/or ablate expression of its encoded products. Additional information includes the chromosomal genomic coordinates (assembly hg38) of the edit site and a score, summarizing several predicted performance metrics.

[0047] FIG. 40 illustrates SEQ ID NOs: 1105-1130, the crRNA sequences generated by the bioinformatic methods herein described that target human IL13RA1 to modify and/or ablate expression of its encoded products. Additional information includes the chromosomal genomic coordinates (assembly hg38) of the edit site and a score, summarizing several predicted performance metrics.

[0048] FIG. 41 illustrates SEQ ID NOs: 1131-1147, the crRNA sequences generated by the bioinformatic methods herein described that target human IL13RA2 to modify and/or ablate expression of its encoded products. Additional information includes the chromosomal genomic coordinates (assembly hg38) of the edit site and a score, summarizing several predicted performance metrics.

[0049] FIG. 42 illustrates SEQ ID NOs: 1148-1173, the crRNA sequences generated by the bioinformatic methods herein described that target human IL17A to modify and/or ablate expression of its encoded products. Additional information includes the chromosomal genomic coordinates (assembly hg38) of the edit site and a score, summarizing several predicted performance metrics.

[0050] FIG. 43 illustrates SEQ ID NOs: 1174-1221, the crRNA sequences generated by the bioinformatic methods herein described that target human IL17RA to modify and/or ablate expression of its encoded products. Additional information includes the chromosomal genomic coordinates (assembly hg38) of the edit site and a score, summarizing several predicted performance metrics.

[0051] FIG. 44 illustrates SEQ ID NOs: 1222-1238, the crRNA sequences generated by the bioinformatic methods herein described that target human IL18 to modify and/or ablate expression of its encoded products. Additional information includes the chromosomal genomic coordinates (assembly hg38) of the edit site and a score, summarizing several predicted performance metrics.

[0052] FIG. 45 illustrates SEQ ID NOs: 1239-1262, the crRNA sequences generated by the bioinformatic methods herein described that target human IL18R1 to modify and/or ablate expression of its encoded products. Additional information includes the chromosomal genomic coordinates (assembly hg38) of the edit site and a score, summarizing several predicted performance metrics.

[0053] FIG. 46 illustrates SEQ ID NOs: 1263-1310, the crRNA sequences generated by the bioinformatic methods herein described that target human IL18RAP to modify and/or ablate expression of its encoded products. Additional information includes the chromosomal genomic coordinates (assembly hg38) of the edit site and a score, summarizing several predicted performance metrics.

[0054] FIG. 47 illustrates SEQ ID NOs: 1311-1343, the crRNA sequences generated by the bioinformatic methods herein described that target human MMP1 to modify and/or ablate expression of its encoded products. Additional information includes the chromosomal genomic coordinates (assembly hg38) of the edit site and a score, summarizing several predicted performance metrics.

[0055] FIG. 48 illustrates SEQ ID NOs: 1344-1391, the crRNA sequences generated by the bioinformatic methods herein described that target human MMP2 to modify and/or ablate expression of its encoded products. Additional information includes the chromosomal genomic coordinates (assembly hg38) of the edit site and a score, summarizing several predicted performance metrics.

[0056] FIG. 49 illustrates SEQ ID NOs: 1392-1417, the crRNA sequences generated by the bioinformatic methods herein described that target human MMP3 to modify and/or ablate expression of its encoded products. Additional information includes the chromosomal genomic coordinates (assembly hg38) of the edit site and a score, summarizing several predicted performance metrics.

[0057] FIG. 50 illustrates SEQ ID NOs: 1418-1436, the crRNA sequences generated by the bioinformatic methods herein described that target human MMP7 to modify and/or ablate expression of its encoded products. Additional information includes the chromosomal genomic coordinates (assembly hg38) of the edit site and a score, summarizing several predicted performance metrics.

[0058] FIG. 51 illustrates SEQ ID NOs: 1437-1474, the crRNA sequences generated by the bioinformatic methods herein described that target human MMP8 to modify and/or ablate expression of its encoded products. Additional information includes the chromosomal genomic coordinates (assembly hg38) of the edit site and a score, summarizing several predicted performance metrics.

[0059] FIG. 52 illustrates SEQ ID NOs: 1475-1497, the crRNA sequences generated by the bioinformatic methods herein described that target human MMP10 to modify and/or ablate expression of its encoded products. Additional information includes the chromosomal genomic coordinates (assembly hg38) of the edit site and a score, summarizing several predicted performance metrics.

[0060] FIG. 53 illustrates SEQ ID NOs: 1498-1541, the crRNA sequences generated by the bioinformatic methods herein described that target human MMP12 to modify and/or ablate expression of its encoded products. Additional information includes the chromosomal genomic coordinates (assembly hg38) of the edit site and a score, summarizing several predicted performance metrics.

[0061] FIG. 54 illustrates SEQ ID NOs: 1542-1568, the crRNA sequences generated by the bioinformatic methods herein described that target human MMP13 to modify and/or ablate expression of its encoded products. Additional information includes the chromosomal genomic coordinates (assembly hg38) of the edit site and a score, summarizing several predicted performance metrics.

[0062] FIG. 55 illustrates SEQ ID NOs: 1569-1585, the crRNA sequences generated by the bioinformatic methods herein described that target human MRGPRX2 to modify and/or ablate expression of its encoded products. Additional information includes the chromosomal genomic coordinates (assembly hg38) of the edit site and a score, summarizing several predicted performance metrics.

[0063] FIG. 56 illustrates SEQ ID NOs: 1586-1628, the crRNA sequences generated by the bioinformatic methods herein described that target human NGF to modify and/or ablate expression of its encoded products. Additional information includes the chromosomal genomic coordinates (assembly hg38) of the edit site and a score, summarizing several predicted performance metrics.

[0064] FIG. 57 illustrates SEQ ID NOs: 1629-1676, the crRNA sequences generated by the bioinformatic methods herein described that target human NGFR to modify and/or ablate expression of its encoded products. Additional information includes the chromosomal genomic coordinates (assembly hg38) of the edit site and a score, summarizing several predicted performance metrics.

[0065] FIG. 58 illustrates SEQ ID NOs: 1677-1724, the crRNA sequences generated by the bioinformatic methods herein described that target human NTF3 to modify and/or ablate expression of its encoded products. Additional information includes the chromosomal genomic coordinates (assembly hg38) of the edit site and a score, summarizing several predicted performance metrics.

[0066] FIG. 59 illustrates SEQ ID NOs: 1725-1746, the crRNA sequences generated by the bioinformatic methods herein described that target human NTF4 to modify and/or ablate expression of its encoded products. Additional information includes the chromosomal genomic coordinates (assembly hg38) of the edit site and a score, summarizing several predicted performance metrics.

[0067] FIG. 60 illustrates SEQ ID NOs: 1747-1794, the crRNA sequences generated by the bioinformatic methods herein described that target human NTRK1 to modify and/or ablate expression of its encoded products. Additional information includes the chromosomal genomic coordinates (assembly hg38) of the edit site and a score, summarizing several predicted performance metrics.

[0068] FIG. 61 illustrates SEQ ID NOs: 1795-1842, the crRNA sequences generated by the bioinformatic methods herein described that target human NTRK2 to modify and/or ablate expression of its encoded products. Additional information includes the chromosomal genomic coordinates (assembly hg38) of the edit site and a score, summarizing several predicted performance metrics.

[0069] FIG. 62 illustrates SEQ ID NOs: 1843-1859, the crRNA sequences generated by the bioinformatic methods herein described that target human RAMP1 to modify and/or ablate expression of its encoded products. Additional information includes the chromosomal genomic coordinates (assembly hg38) of the edit site and a score, summarizing several predicted performance metrics.

[0070] FIG. 63 illustrates SEQ ID NOs: 1860-1907, the crRNA sequences generated by the bioinformatic methods herein described that target human SCN1A to modify and/or ablate expression of its encoded products. Additional information includes the chromosomal genomic coordinates (assembly hg38) of the edit site and a score, summarizing several predicted performance metrics.

[0071] FIG. 64 illustrates SEQ ID NOs: 1908-1955, the crRNA sequences generated by the bioinformatic methods herein described that target human SCN2A to modify and/or ablate expression of its encoded products. Additional information includes the chromosomal genomic coordinates (assembly hg38) of the edit site and a score, summarizing several predicted performance metrics.

[0072] FIG. 65 illustrates SEQ ID NOs: 1956-2003, the crRNA sequences generated by the bioinformatic methods herein described that target human SCN3A to modify and/or ablate expression of its encoded products. Additional information includes the chromosomal genomic coordinates (assembly hg38) of the edit site and a score, summarizing several predicted performance metrics.

[0073] FIG. 66 illustrates SEQ ID NOs: 2004-2051, the crRNA sequences generated by the bioinformatic methods herein described that target human SCN4A to modify and/or ablate expression of its encoded products. Additional information includes the chromosomal genomic coordinates (assembly hg38) of the edit site and a score, summarizing several predicted performance metrics.

[0074] FIG. 67 illustrates SEQ ID NOs: 2052-2099, the crRNA sequences generated by the bioinformatic methods herein described that target human SCN5A to modify and/or ablate expression of its encoded products. Additional information includes the chromosomal genomic coordinates (assembly hg38) of the edit site and a score, summarizing several predicted performance metrics.

[0075] FIG. 68 illustrates SEQ ID NOs: 2100-2147, the crRNA sequences generated by the bioinformatic methods herein described that target human SCN8A to modify and/or ablate expression of its encoded products. Additional information includes the chromosomal genomic coordinates (assembly hg38) of the edit site and a score, summarizing several predicted performance metrics.

[0076] FIG. 69 illustrates SEQ ID NOs: 2148-2195, the crRNA sequences generated by the bioinformatic methods herein described that target human SCN9A to modify and/or ablate expression of its encoded products. Additional information includes the chromosomal genomic coordinates (assembly hg38) of the edit site and a score, summarizing several predicted performance metrics.

[0077] FIG. 70 illustrates SEQ ID NOs: 2196-2243, the crRNA sequences generated by the bioinformatic methods herein described that target human SCN10A to modify and/or ablate expression of its encoded products. Additional information includes the chromosomal genomic coordinates (assembly hg38) of the edit site and a score, summarizing several predicted performance metrics.

[0078] FIG. 71 illustrates SEQ ID NOs: 2244-2291, the crRNA sequences generated by the bioinformatic methods herein described that target human SCN11A to modify and/or ablate expression of its encoded products. Additional information includes the chromosomal genomic coordinates (assembly hg38) of the edit site and a score, summarizing several predicted performance metrics.

[0079] FIG. 72 illustrates SEQ ID NOs: 2292-2308, the crRNA sequences generated by the bioinformatic methods herein described that target human TAC1 to modify and/or ablate expression of its encoded products. Additional information includes the chromosomal genomic coordinates (assembly hg38) of the edit site and a score, summarizing several predicted performance metrics.

[0080] FIG. 73 illustrates SEQ ID NOs: 2309-2325, the crRNA sequences generated by the bioinformatic methods herein described that target human TAC3 to modify and/or ablate expression of its encoded products. Additional information includes the chromosomal genomic coordinates (assembly hg38) of the edit site and a score, summarizing several predicted performance metrics.

[0081] FIG. 74 illustrates SEQ ID NOs: 2326-2373, the crRNA sequences generated by the bioinformatic methods herein described that target human TACR1 to modify and/or ablate expression of its encoded products. Additional information includes the chromosomal genomic coordinates (assembly hg38) of the edit site and a score, summarizing several predicted performance metrics.

[0082] FIG. 75 illustrates SEQ ID NOs: 2374-2421, the crRNA sequences generated by the bioinformatic methods herein described that target human TACR2 to modify and/or ablate expression of its encoded products. Additional information includes the chromosomal genomic coordinates (assembly hg38) of the edit site and a score, summarizing several predicted performance metrics.

[0083] FIG. 76 illustrates SEQ ID NOs: 2422-2469, the crRNA sequences generated by the bioinformatic methods herein described that target human TACR3 to modify and/or ablate expression of its encoded products. Additional information includes the chromosomal genomic coordinates (assembly hg38) of the edit site and a score, summarizing several predicted performance metrics.

[0084] FIG. 77 illustrates SEQ ID NOs: 2470-2509, the crRNA sequences generated by the bioinformatic methods herein described that target human TIMP1 to modify and/or ablate expression of its encoded products. Additional information includes the chromosomal genomic coordinates (assembly hg38) of the edit site and a score, summarizing several predicted performance metrics.

[0085] FIG. 78 illustrates SEQ ID NOs: 2510-2557, the crRNA sequences generated by the bioinformatic methods herein described that target human TIMP3 to modify and/or ablate expression of its encoded products. Additional information includes the chromosomal genomic coordinates (assembly hg38) of the edit site and a score, summarizing several predicted performance metrics.

[0086] FIG. 79 illustrates SEQ ID NOs: 2558-2574, the crRNA sequences generated by the bioinformatic methods herein described that target human TNF to modify and/or ablate expression of its encoded products. Additional information includes the chromosomal genomic coordinates (assembly hg38) of the edit site and a score, summarizing several predicted performance metrics.

[0087] FIG. 80 illustrates SEQ ID NOs: 2575-2622, the crRNA sequences generated by the bioinformatic methods herein described that target human TNFRSF1A to modify and/or ablate expression of its encoded products. Additional information includes the chromosomal genomic coordinates (assembly hg38) of the edit site and a score, summarizing several predicted performance metrics.

[0088] FIG. 81 illustrates SEQ ID NOs: 2623-2670, the crRNA sequences generated by the bioinformatic methods herein described that target human TNFRSF1B to modify and/or ablate expression of its encoded products. Additional information includes the chromosomal genomic coordinates (assembly hg38) of the edit site and a score, summarizing several predicted performance metrics.

[0089] FIG. 82 illustrates SEQ ID NOs: 2671-2718, the crRNA sequences generated by the bioinformatic methods herein described that target human YAP1 to modify and/or ablate expression of its encoded products. Additional information includes the chromosomal genomic coordinates (assembly hg38) of the edit site and a score, summarizing several predicted performance metrics.

[0090] FIGS. 83A, 83B, 83C, and 83D collectively illustrate the results of cell-based and in-silico gene editing analysis of crRNA sequences targeting (A) hIL1A, (B) hIL1B, (C) cIL1A, and (D) cIL1B genes. ‘º’ denotes CRISPR cut position within the translation frame of amino acids (AA). ‘*’ denotes optimized score from Doench, Fusi et al. (2016). This score is optimized for 20 bp guides with an NGG PAM. Score spans from 0 to 100. Higher is better. ** Specificity score from Hsu et al. (2013). Score spans from 0 to 100. Higher is better. *** This score is based on experiments in U2OS. A high precision score (>0.4) implies that DNA repair outcomes are uniform and enriched for just a handful of unique genotypes. **** This score is based on experiments in U2OS. A high (>80%) frameshift frequency will tend to knock a protein-coding gene out of frame. The typical genomic frameshift frequency is above 66% because 1-bp insertions and 1-2 bp deletions are particularly common repair outcomes. \hat{ }

[0091] Combined score=(Off-target score+Precision score*100+Frameshift)/3. † Pipe symbol ‘|’ indicates CRISPR cut site. Curly braces ‘{ }’ indicate insertion. Hyphen ‘-’ indicates deletion. $ Potential off-target sites. Scoring according to Hsu et al. (2013). The on-target site has a score of 100.

[0092] FIGS. 84A, 84B, 84C, and 84D collectively illustrate results of functional assays in edited or control canine chondrocytes measuring (A, B) cIL1A and (C,D) cIL1B release at 6 hours and 24 hours post-exposure to PBS or LPS.

[0093] FIGS. 85A, 85B, 85C, and 85D collectively illustrate results of functional assays in edited and control chondrocytes measuring (A, B) hIL1A and (C,D) cIL1B release from 6 hours and 24 hours after exposure to PBS or LPS.

[0094] FIG. 86 illustrates the results of a tissue-specific splicing and expression analysis of the hIL1A gene.

[0095] FIG. 87 illustrates the results of a tissue-specific splicing and expression analysis of hIL1B gene.

[0096] FIG. 88 illustrates the results of an in silico analysis of crRNAs targeting either hIL1A or hIL1B. On-target score (see Doench et al.) is optimized for 20-bp gRNA with NGG protospacer adjacent motif (PAM). Score spans from 0 to 1. Precision score is based on experiments in U2OS cells. A high precision score (>0.4) implies that DNA repair outcomes are uniform and enriched for just a handful of unique genotypes. Frameshift percentage is based on experiments in U2OS cells. A high (>80%) frameshift frequency will tend to knock a protein-coding gene out of frame. The typical genomic frameshift frequency is above 66% because 1-bp insertions and 1-2 bp deletions are particularly common repair outcomes. Off-target score from CRISPR assess the number of matches in the genome with a given number of mismatches. Mismatches in Seed sequence have a more deleterious effect.

[0097] FIG. 89 illustrates results of splicing and functional analyses on cIL1A and cIL1B genes. The reference canine genome assembly (CanFam3.1) was used for these analyses.

[0098] FIG. 90 illustrates the results of an in silico analysis of crRNAs targeting either cIL1A or cIL1B genes.

[0099] FIGS. 91A, 91B, and 91C collectively illustrate knockdown efficacy of selected sgRNAs in (A) human chondrocytes, (B) canine chondrocytes and (C) canine synoviocytes.

[0100] FIG. 92 illustrates the results of an in silico analysis of the off-target effects for multiple sgRNAs in canine cells.

[0101] FIGS. 93A and 93B collectively illustrate (A) the efficacy of enhanced-specificity Cas9 (espCas9) to abrogate the off-target editing of the indicated sgRNA in canine cells as compared to (B) the effects with canonical spCas9.

[0102] FIGS. 94A and 94B collectively illustrate summaries of editing activity for crRNAs targeting IL1A and IL1B in (A) humans and (B) canine chondrocytes.

[0103] FIG. 95 illustrates results of co-administrating multiple sgRNAs in canine cells either simultaneously or sequentially.

[0104] FIGS. 96A and 96B collectively illustrate sequence alignments of (A) IL1A and (B) IL1B genes for disparate mammalian species (human, horse, mouse and dog).

### DETAILED DESCRIPTION OF THE DISCLOSURE

### I. Introduction

[0105] Provided herein are compositions and methods for silencing the translation of one or more proteins in an animal in need thereof to treat a disease, illness or condition associated with pain.

[0106] In some embodiments, receptor signaling is silenced by CRISPR editing of the gene encoding the receptor. In some embodiments, the CRISPR editing results in ablation of a transmembrane domain (i.e., generation of a soluble decoy receptor). In some embodiments, the CRISPR editing results in ablation of a cytoplasmic domain (i.e., generation of a membrane-bound decoy receptor). In particular embodiments, compositions and methods are provided to gene-edit FGF2, CCN2, ADAMTS5, MMP1 and/or NGF.

### II. Definitions

[0107] Unless defined otherwise, all technical and scientific terms used herein have the same meaning as is commonly understood by one of skill in the art to which this invention belongs. All patents and publications referred to herein are incorporated by reference in their entireties.

[0108] In some embodiments, pain is ameliorated by silencing of a nociception signaling protein (or its cognate receptor) via CRISPR editing of the gene encoding the protein (or receptor). In some embodiments, the CRISPR editing results in ablation of a transmembrane domain of a pain receptor (i.e., generation of a soluble decoy receptor). In some embodiments, the CRISPR editing results in ablation of the cytoplasmic domain of a pain receptor (i.e., generation of a membrane-bound decoy receptor). In particular embodiments, compositions and methods are provided to gene-edit (i) one or more growth factors or growth factor receptors (e.g., FGF2, CCN2, NGF, NTF3, NTF4, BDNF, FGFR1, NGFR, NTRK1, or NTRK2), (ii) one or more metalloproteases or regulators thereof (e.g., ADAM17, ADAMTS1, ADAMTS5, MMP1, MMP2, MMP3, MMP7, MMP8, MMP10, MMP12, MMP13, TIMP1, or TIMP3), (iii) one or more cytokines, chemokines or cytokine/chemokine receptors (e.g., CXCL1, CXCL2, CXCL3, CXCL5, CXCL6, CXCL8, CCL2, CCL3, CCL5, CCL7, CCL20, IL1A, IL1B, IL4, IL6, IL10, IL13, IL17A, IL18, TNF, CXCR1, CXCR2, CCR7, TNFRSF1A, TNFRSF1B, IL1R1, IL1RAP, IL4R, IL6R, IL10RA, IL10RB, IL13RA1, IL13RA2, IL17RA, IL18R1, or IL18RAP), (iv) one or more regulators of neuronal signaling (e.g., SCN1A, SCN2A, SCN3A, SCN4A, SCN5A, SCN8A, SCN9A, SCN10A, SCN11A, TAC1, TAC3, TACR1, TACR2, TACR3, or ATP1A1), (v) one or more other regulators of cell signaling (e.g., CALCA, CALCB, CALCRL, RAMP1, ADM, CRCP, YAP1, MRGPRX2), or (vi) a combination of any genes of (i)-(v) to ameliorate pain.

### Definitions

[0109] Unless defined otherwise, all technical and scientific terms used herein have the same meaning as is commonly understood by one of skill in the art to which this disclosure belongs. All patents and publications referred to herein are incorporated by reference in their entireties.

[0110] The term “FGF2 gene” refers to a mammalian gene encoding a Fibroblast growth factor 2 polypeptide. Non-limiting examples of FGF2 genes include: NCBI Gene ID: 2247 [human], NCBI Gene ID: 403857 [canine], NCBI Gene ID: 100033955 [equine], NCBI Gene ID: 100135772 [feline], as well as synonymous and non-synonymous sequence variants thereof. Non-limiting examples of gene products encoded by an FGF2 gene include: UniProt: P09038; NP_001348594.1 [human], XP_038421156.1 [canine], NP_001182150.1 [equine], XP_044911834.1 [feline]), as well as sequence variants, isoforms encoded by alternative splicing, and various glycoforms thereof. Canonically, the proteins encoded by the genes listed above act as ligands for the FGF receptors FGFR1, FGFR2, FGFR3 and FGFR4 in addition to strongly binding heparin and integrins. Additionally, FGF2 signaling is thought to impact localized nociception via at least its pro-angiogenic activity and has been implicated in pain perception related to at least IVD degeneration and at joint lesions. In some instances, and merely for the sake of disambiguation, a prefix is added when referring to the protein or gene of a particular species (with h, c, e, and f referring to the human, canine, equine, and feline forms, respectively).

[0111] The term “FGFR1 gene” refers to a mammalian gene encoding a Fibroblast Growth Factor Receptor 1 polypeptide. Non-limiting examples of FGFR1 genes include: NCBI Gene ID: 2260 [human], NCBI Gene ID: 100856477 [canine], NCBI Gene ID: 100057614 [equine], NCBI Gene ID: 101086055 [feline] as well as synonymous and non-synonymous sequence variants thereof. Non-limiting examples of gene products encoded by an FGFR1 gene include: UniProt: P11362; NP_001167534.1 [human], XP_038545782.1 [canine], XP_023486323.1 [equine], XP_011279822.1 [feline], as well as sequence variants, isoforms encoded by alternative splicing, and various glycoforms thereof. Canonically, the proteins encoded by the genes listed above are tyrosine-protein kinases that act as cell-surface receptor for fibroblast growth factors. In that role, they play an essential role in the regulation of embryonic development, cell proliferation, differentiation and migration. In some instances, and merely for the sake of disambiguation, a prefix is added when referring to the protein or gene of a particular species (with h, c, e, and f referring to the human, canine, equine, and feline forms, respectively).

[0112] The term “CCN2 gene refers to a mammalian gene encoding a Cellular Communication Network Factor 2 polypeptide. Non-limiting examples of CCN2 genes include: NCBI Gene ID: 1490 [human], NCBI Gene ID: 476202 [canine], NCBI Gene ID: 100073098 [equine], NCBI Gene ID: 101094598 [feline], as well as synonymous and non-synonymous sequence variants thereof. Non-limiting examples of gene products encoded by a CCN2 gene include: UniProt: P29279; NP_001892.2 [human], XP_038321343.1 [canine], XP_023506869.1 [equine], XP_023110145.1 [feline], as well as sequence variants, isoforms encoded by alternative splicing, and various glycoforms thereof. Canonically, the proteins encoded by the genes listed above are mitogens secreted by vascular endothelial cells and are related to chondrocyte proliferation and differentiation, cell adhesion in many cell types. In some instances, and merely for the sake of disambiguation, a prefix is added when referring to the protein or gene of a particular species (with h, c, e, and f referring to the human, canine, equine, and feline forms, respectively).

[0113] The term “ADAMTS5 gene” refers to a mammalian gene encoding an ADAM Metallopeptidase with Thrombospondin Type 1 Motif 5 polypeptide. Non-limiting examples of ADAMTS5 genes include: NCBI Gene ID: 11096 [human], NCBI Gene ID: 487713 [canine], NCBI Gene ID: 100066005 [equine], NCBI Gene ID: 101085063 [feline], as well as synonymous and non-synonymous sequence variants thereof. Non-limiting examples of gene products encoded by an ADAMTS5 gene include: UniProt: Q9UNA0; NP_008969.2 [human], XP_038299214.1 [canine], XP 023485737.1 [equine], XP_023094603.1 [feline], as well as sequence variants, isoforms encoded by alternative splicing, and various glycoforms thereof. Canonically, members of the family share several distinct protein modules, including a propeptide region, a metalloproteinase domain, a disintegrin-like domain, and a thrombospondin type 1 (TS) motif with individual members of the family differing in the number of C-terminal TS motifs. ADAMTS5 has two unique C-terminal domains. Once proteolytically processed to generate the mature enzyme, ADAMTS5 functions as an aggrecanase that cleaves aggrecan, a major proteoglycan of cartilage, and may mediate cartilage destruction in osteoarthritis. In some instances, and merely for the sake of disambiguation, a prefix is added when referring to the protein or gene of a particular species (with h, c, e, and f referring to the human, canine, equine, and feline forms, respectively).

[0114] The term “ADAMTS1 gene” refer to a mammalian gene encoding an ADAM Metallopeptidase with Thrombospondin Type 1 Motif 1 polypeptide. Non-limiting examples of ADAMTS1 genes include: NCBI Gene ID: 9510 [human], NCBI Gene ID: 100686153 [canine], NCBI Gene ID: 791251 [equine], NCBI Gene ID: 101085309 [feline], as well as synonymous and non-synonymous sequence variants thereof. Non-limiting examples of gene products encoded by an ADAMTS1 gene include: UniProt: Q9UH18; NP_008919.3 [human], XP_038374156.1 [canine], XP_023485736.1 [equine], XP_019695041.3 [feline], as well as sequence variants, isoforms encoded by alternative splicing, and various glycoforms thereof. Canonically, members of the family share several distinct protein modules, including a propeptide region, a metalloproteinase domain, a disintegrin-like domain, and a thrombospondin type 1 (TS) motif with individual members of the family differing in the number of C-terminal TS motifs. ADAMTS1 contains two disintegrin loops and three C-terminal TS motifs. The protein has anti-angiogenic activity and functions as an aggrecanase that cleaves aggrecan, a major proteoglycan of cartilage, and may be involved in its turnover and has been associated with various inflammatory processes. In some instances, and merely for the sake of disambiguation, a prefix is added when referring to the protein or gene of a particular species (with h, c, e, and f, referring to the human, canine, equine, and feline forms, respectively).

[0115] The term “MMP1 gene” refers to a mammalian gene encoding a Matrix Metallopeptidase 1 polypeptide. Non-limiting examples of MMP1 genes include: NCBI Gene ID: 4312 [human], NCBI Gene ID: 489428 [canine], NCBI Gene ID: 100033896 [equine], NCBI Gene ID: 101084217 [feline], as well as synonymous and non-synonymous sequence variants thereof. Non-limiting examples of gene products encoded by an MMP1 gene include: UniProt: P03956; NP_001139410.1 [human], XP_038521018.1 [canine], NP_001075316.1 [equine], XP 003992365.2 [feline], as well as sequence variants, isoforms encoded by alternative splicing, and various glycoforms thereof. Canonically, MMP1 is proteolytically processed from a preproprotein to generate the mature protease. This secreted protease breaks down the interstitial collagens, including types I, II, and III. In some instances, and merely for the sake of disambiguation, a prefix is added when referring to the protein or gene of a particular species (with h, c, e, and f, referring to the human, canine, equine, and feline forms, respectively).

[0116] The term “MMP2 gene” refers to a mammalian gene encoding a Matrix Metallopeptidase 2 polypeptide. Non-limiting examples of MMP2 genes include: NCBI Gene ID: 4313 [human], NCBI Gene ID: 403733 [canine], NCBI Gene ID: 100033948 [equine], NCBI Gene ID: 101098838 [feline], as well as synonymous and non-synonymous sequence variants thereof. Non-limiting examples of gene products encoded by an MMP2 gene include: UniProt: P08253; NP_001121363.1 [human], XP_038515255.1 [canine], XP_023492775.1 [equine], XP_003998091.2 [feline], as well as sequence variants, isoforms encoded by alternative splicing, and various glycoforms thereof. Canonically, the protein encoded by this gene belongs to the broader family of zinc-dependent enzymes that cleave components of the extracellular matrix. MMP2 is a gelatinase A, type IV collagenase, that contains three fibronectin type II repeats in its catalytic site that allow binding of denatured type IV and V collagen and elastin. In some instances, and merely for the sake of disambiguation, a prefix is added when referring to the protein or gene of a particular species (with h, c, e, and f, referring to the human, canine, equine, and feline forms, respectively).

[0117] The term “MMP3 gene” refers to a mammalian gene encoding a Matrix Metallopeptidase 3 polypeptide. Non-limiting examples of MMP3 genes include: NCBI Gene ID: 4314 [human], NCBI Gene ID: 403733 [canine], NCBI Gene ID: 100034195 [equine], NCBI Gene ID: 493666 [feline], as well as synonymous and non-synonymous sequence variants thereof. Non-limiting examples of gene products encoded by an MMP3 gene include: UniProt: P08254; NP_002413.1 [human], NP_001002967.1 [canine], NP_001075964.1 [equine], XP_003992356.2 [feline], as well as sequence variants, isoforms encoded by alternative splicing, and various glycoforms thereof. Canonically, the protein encoded by this gene belongs to the broader family of zinc-dependent enzymes that cleave components of the extracellular matrix. MMP3 is an enzyme that degrades fibronectin, laminin, collagens III, IV, IX, and X, and cartilage proteoglycans and is thought to be involved in wound repair, progression of atherosclerosis, and tumor initiation. In some instances, and merely for the sake of disambiguation, a prefix is added when referring to the protein or gene of a particular species (with h, c, e, and f referring to the human, canine, equine, and feline forms, respectively).

[0118] The term “MMP7 gene” refers to a mammalian gene encoding a Matrix Metallopeptidase 7 polypeptide. Non-limiting examples of MMP7 genes include: NCBI Gene ID: 4316 [human], NCBI Gene ID: 489432 [canine], NCBI Gene ID: 100068985 [equine], NCBI Gene ID: 727698 [feline], as well as synonymous and non-synonymous sequence variants thereof. Non-limiting examples of gene products encoded by an MMP7 gene include: UniProt: P09237; NP_002414.1 [human], NP_001229655.1 [canine], XP_001498859.1 [equine], XP_003992352.1 [feline], as well as sequence variants, isoforms encoded by alternative splicing, and various glycoforms thereof. Canonically, the protein encoded by this gene belongs to the broader family of zinc-dependent enzymes that cleave components of the extracellular matrix. MMP7 is proteolytically processed to generate the mature protease, which breaks down proteoglycans, fibronectin, elastin and casein in addition to activating procollagenase. In some instances, and merely for the sake of disambiguation, a prefix is added when referring to the protein or gene of a particular species (with h, c, e, and f, referring to the human, canine, equine, and feline forms, respectively).

[0119] The term “MMP8 gene” refers to a mammalian gene encoding a Matrix Metallopeptidase 8 polypeptide. Non-limiting examples of MMP8 genes include: NCBI Gene ID: 4317 [human], NCBI Gene ID: 489429 [canine], NCBI Gene ID: 100069005 [equine], NCBI Gene ID: 101080995 [feline], as well as synonymous and non-synonymous sequence variants thereof. Non-limiting examples of gene products encoded by an MMP8 gene include: UniProt: P22894; NP_001291370.1 [human], XP_038521019.1 [canine], XP_005611595.1 [equine], XP_003992354.3 [feline], as well as sequence variants, isoforms encoded by alternative splicing, and various glycoforms thereof. Canonically, the protein encoded by this gene belongs to the broader family of zinc-dependent enzymes that cleave components of the extracellular matrix. MMP8 is an enzyme that degrades interstitial collagens. In some instances, and merely for the sake of disambiguation, a prefix is added when referring to the protein or gene of a particular species (with h, c, e, and f, referring to the human, canine, equine, and feline forms, respectively).

[0120] The term “MMP10 gene” refers to a mammalian gene encoding a Matrix Metallopeptidase 10 polypeptide. Non-limiting examples of MMP10 genes include: NCBI Gene ID: 4319 [human], NCBI Gene ID: 100146442 [equine], NCBI Gene ID: 101081247 [feline], as well as synonymous and non-synonymous sequence variants thereof. Non-limiting examples of gene products encoded by an MMP10 gene include: UniProt: P09238; NP_002416.1 [human], XP_005614947.1 [equine], XP_003992355.2 [feline], as well as sequence variants, isoforms encoded by alternative splicing, and various glycoforms thereof. Canonically, the protein encoded by this gene belongs to the broader family of zinc-dependent enzymes that cleave components of the extracellular matrix. MMP10 is an enzyme that degrades fibronectin, and type I, III, IV, and V gelatins. In some instances, and merely for the sake of disambiguation, a prefix is added when referring to the protein or gene of a particular species (with h, c, e, and f, referring to the human, canine, equine, and feline forms, respectively).

[0121] The term “MMP12 gene” refers to a mammalian gene encoding a Matrix Metallopeptidase 12 polypeptide. Non-limiting examples of MMP12 genes include: NCBI Gene ID: 4321 [human], NCBI Gene ID: 611789 [canine], NCBI Gene ID: 100069047 [equine], NCBI Gene ID: 101084472 [feline], as well as synonymous and non-synonymous sequence variants thereof. Non-limiting examples of gene products encoded by an MMP12 gene include: UniProt: P39900; NP_002417.2 [human], NP_001274067.1 [canine], XP_001498924.2 [equine], XP_003992366.2 [feline], as well as sequence variants, isoforms encoded by alternative splicing, and various glycoforms thereof. Canonically, the protein encoded by this gene belongs to the broader family of zinc-dependent enzymes that cleave components of the extracellular matrix. MMP12 is an enzyme with significant elastolytic activity and may be involved in tissue injury and remodeling. In some instances, and merely for the sake of disambiguation, a prefix is added when referring to the protein or gene of a particular species (with h, c, e, and f, referring to the human, canine, equine, and feline forms, respectively).

[0122] The term “MMP13 gene” refers to a mammalian gene encoding a Matrix Metallopeptidase 13 polypeptide. Non-limiting examples of MMP13 genes include: NCBI Gene ID: 4322 [human], NCBI Gene ID: 403763 [canine], NCBI Gene ID: 100009711 [equine], NCBI Gene ID: 493679 [feline], as well as synonymous and non-synonymous sequence variants thereof. Non-limiting examples of gene products encoded by an MMP13 gene include: UniProt: P45452; NP_002418.1 [human], XP_038521017.1 [canine], NP_001075273.1 [equine], XP_023094811.2 [feline], as well as sequence variants, isoforms encoded by alternative splicing, and various glycoforms thereof. Canonically, the protein encoded by this gene belongs to the broader family of zinc-dependent enzymes that cleave components of the extracellular matrix. MMP13 is an enzyme that degrades various types of collagen and has been implicated in wound healing, tissue remodeling, cartilage degradation, bone development, bone mineralization and ossification. In some instances, and merely for the sake of disambiguation, a prefix is added when referring to the protein or gene of a particular species (with h, c, e, and f, referring to the human, canine, equine, and feline forms, respectively).

[0123] The term “TIMP1 gene” refers to a mammalian gene encoding a TIMP Metallopeptidase Inhibitor 1 polypeptide. Non-limiting examples of TIMP1 genes include: NCBI Gene ID: 7076 [human], NCBI Gene ID: 403816 [canine], NCBI Gene ID: 100034220 [equine], NCBI Gene ID: 101095886 [feline], as well as synonymous and non-synonymous sequence variants thereof. Non-limiting examples of gene products encoded by a TIMP1 gene include: UniProt: P01033; NP_003245.1 [human], NP_001003182.1 [canine], XP_023488949.1 [equine], XP_023105059.1 [feline], as well as sequence variants, isoforms encoded by alternative splicing, and various glycoforms thereof. Canonically, the protein encoded by this gene functions by forming one to one complexes with target metalloproteinases, such as collagenases, irreversibly inactivating through binding to their catalytic zinc cofactor. TIMP1 acts on MMP1, MMP2, MMP3, MMP7, MMP8, MMP9, MMP10, MMP11, MMP12, MMP13 and MMP16, but not on MMP14 and has been shown to act as a growth factor regulating cell differentiation, migration and cell death. In some instances, and merely for the sake of disambiguation, a prefix is added when referring to the protein or gene of a particular species (with h, c, e, and f, referring to the human, canine, equine, and feline forms, respectively).

[0124] The term “TIMP3 gene” refers to a mammalian gene encoding a TIMP Metallopeptidase Inhibitor 3 polypeptide. Non-limiting examples of TIMP3 genes include: NCBI Gene ID: 7078 [human], NCBI Gene ID: 481289 [canine], NCBI Gene ID: 100033947 [equine], NCBI Gene ID: 101091215 [feline], as well as synonymous and non-synonymous sequence variants thereof. Non-limiting examples of gene products encoded by a TIMP3 gene include: UniProt: P35625; NP_000353.1 [human], NP_001271368.1 [canine], NP_001075339.1 [equine], XP_003989265.1 [feline], as well as sequence variants, isoforms encoded by alternative splicing, and various glycoforms thereof. Canonically, the protein encoded by this gene complexes with metalloproteinases (such as collagenases) to irreversibly inactivate them by binding to their catalytic zinc cofactor. TIMP3 is known to act on MMP1, MMP2, MMP3, MMP7, MMP9, MMP13, MMP14 and MMP15. In some instances, and merely for the sake of disambiguation, a prefix is added when referring to the protein or gene of a particular species (with h, c, e, and f referring to the human, canine, equine, and feline forms, respectively).

[0125] The term “CXCL1 gene” refers to a mammalian gene encoding a C-X-C Motif Chemokine Ligand 1 polypeptide. Non-limiting examples of CXCL1 genes include: NCBI Gene ID: 2919 [human], NCBI Gene ID: 100034121 [equine], NCBI Gene ID: 102901432 [feline], as well as synonymous and non-synonymous sequence variants thereof. Non-limiting examples of gene products encoded by a CXCL1 gene include: UniProt: P09341; NP_001502.1 [human], NP_001296409.1 [equine], XP_023108817.2 [feline], as well as sequence variants, isoforms encoded by alternative splicing, and various glycoforms thereof. Canonically, the protein encoded by this gene has chemotactic activity for neutrophils and may play a role inflammation. In some instances, and merely for the sake of disambiguation, a prefix is added when referring to the protein or gene of a particular species (with h, c, e, and f referring to the human, canine, equine, and feline forms, respectively).

[0126] The term “CXCL2 gene” refers to a mammalian gene encoding a C-X-C Motif Chemokine Ligand 2 polypeptide. Non-limiting examples of CXCL2 genes include: NCBI Gene ID: 2920 [human], NCBI Gene ID: 100233237 [equine], as well as synonymous and non-synonymous sequence variants thereof. Non-limiting examples of gene products encoded by a CXCL2 gene include: UniProt: P19875, Q9UPB8; NP_002080.1 [human], NP_001137427.1 [equine], as well as sequence variants, isoforms encoded by alternative splicing, and various glycoforms thereof. Canonically, the protein encoded by this gene has antimicrobial function via its regulation of inflammatory and immunoregulatory processes. CXCL2 is expressed at the site of inflammation and has been shown to suppress proliferation of hematopoietic progenitor cells. In some instances, and merely for the sake of disambiguation, a prefix is added when referring to the protein or gene of a particular species (with h, c, e, and f referring to the human, canine, equine, and feline forms, respectively).

[0127] The term “CXCL3 gene” refers to a mammalian gene encoding a C-X-C Motif Chemokine Ligand 3 polypeptide. Non-limiting examples of CXCL3 genes include: NCBI Gene ID: 2921 [human] NCBI Gene ID: 100056258 [equine], as well as synonymous and non-synonymous sequence variants thereof. Non-limiting examples of gene products encoded by a CXCL3 gene include: UniProt: P19876, Q4W5H9; NP_002081.2 [human], NP_001137265.1 [equine], as well as sequence variants, isoforms encoded by alternative splicing, and various glycoforms thereof. Canonically, the protein encoded by this gene is a secreted growth factor that signals through the G-protein coupled receptor, CXCR2 and plays a role in inflammation and as a chemoattractant for neutrophils. In some instances, and merely for the sake of disambiguation, a prefix is added when referring to the protein or gene of a particular species (with h, c, e, and f referring to the human, canine, equine, and feline forms, respectively).

[0128] The term “CXCL5 gene” refers to a mammalian gene encoding a C-X-C Motif Chemokine Ligand 5 polypeptide. Non-limiting examples of CXCL5 genes include: NCBI Gene ID: 6374 [human], as well as synonymous and non-synonymous sequence variants thereof. Non-limiting examples of gene products encoded by a CXCL5 gene include: UniProt: P19876, Q4W5H9; NP_002081.2 [human], UniProt: P97885 [rat], UniProt: P50228 [mouse] as well as sequence variants, isoforms encoded by alternative splicing, and various glycoforms thereof. Canonically, the protein encoded by this gene is thought to interact with the G-protein coupled receptor, CXCR2 to promote angiogenesis, remodel connective tissues and recruit neutrophils. In some instances, and merely for the sake of disambiguation, a prefix is added when referring to the protein or gene of a particular species (with h, c, e, and f referring to the human, canine, equine, and feline forms, respectively).

[0129] The term “CXCL6 gene” refers to a mammalian gene encoding a C-X-C Motif Chemokine Ligand 6 polypeptide. Non-limiting examples of CXCL6 genes include: NCBI Gene ID: 6372 [human], NCBI Gene ID: 106557449 [canine], NCBI Gene ID: 100033988 [equine], NCBI Gene ID: 101094593 [feline], as well as synonymous and non-synonymous sequence variants thereof. Non-limiting examples of gene products encoded by a CXCL6 gene include: UniProt: P80162; NP_002984.1 [human], XP_038541813.1 [canine], NP_001075355.2 [equine], XP_003985379.3 [feline] as well as sequence variants, isoforms encoded by alternative splicing, and various glycoforms thereof. Canonically, the protein encoded by this gene is a chemotactic factor for neutrophils and exhibits antibacterial activity. In some instances, and merely for the sake of disambiguation, a prefix is added when referring to the protein or gene of a particular species (with h, c, e, and f referring to the human, canine, equine, and feline forms, respectively).

[0130] The term “CXCL8 gene” refers to a mammalian gene encoding a C-X-C Motif Chemokine Ligand 8 polypeptide. Non-limiting examples of CXCL8 genes include: NCBI Gene ID: 3576 [human], NCBI Gene ID: 403850 [canine], NCBI Gene ID: 100037400 [equine], NCBI Gene ID: 493836 [feline], as well as synonymous and non-synonymous sequence variants thereof. Non-limiting examples of gene products encoded by a CXCL8 gene include: UniProt: P10145; NP_000575.1 [human], NP_001003200.1 [canine], NP_001077420.2 [equine], NP_001009281.1 [feline], as well as sequence variants, isoforms encoded by alternative splicing, and various glycoforms thereof. Canonically, the protein encoded by this gene is secreted by mononuclear macrophages, neutrophils, eosinophils, T lymphocytes, epithelial cells, and fibroblasts and functions as a chemotactic factor that guides neutrophils to the site of infection. CXCL8 also participates with other cytokines in the proinflammatory signaling cascade. In some instances, and merely for the sake of disambiguation, a prefix is added when referring to the protein or gene of a particular species (with h, c, e, and f referring to the human, canine, equine, and feline forms, respectively).

[0131] The term “CCL2 gene” refers to a mammalian gene encoding a C-C Motif Chemokine Ligand 2” polypeptide. Non-limiting examples of CCL2 genes include: NCBI Gene ID: 6347 [human], NCBI Gene ID: 403981 [canine], NCBI Gene ID: 100034136 [equine], NCBI Gene ID: 100127112 [feline], as well as synonymous and non-synonymous sequence variants thereof. Non-limiting examples of gene products encoded by a CCL2 gene include: UniProt: P13500; NP_002973.1 [human], NP_001003297.1 [canine], NP_001075400.1 [equine], XP_003996605.1 [feline], as well as sequence variants, isoforms encoded by alternative splicing, and various glycoforms thereof. Canonically, the protein encoded by this gene acts as a ligand for CCR2, which induces chemotactic activity for monocytes and basophils (but not neutrophils or eosinophils). In some instances, and merely for the sake of disambiguation, a prefix is added when referring to the protein or gene of a particular species (with h, c, e, and f, referring to the human, canine, equine, and feline forms, respectively).

[0132] The term “CCL3 gene” refers to a mammalian gene encoding a C-C Motif Chemokine Ligand 3 polypeptide. Non-limiting examples of CCL3 genes include: NCBI Gene ID: 6348 [human], NCBI Gene ID: 448787 [canine], NCBI Gene ID: 100057909 [equine], NCBI Gene ID: 100302540 [feline], as well as synonymous and non-synonymous sequence variants thereof. Non-limiting examples of gene products encoded by a CCL3 gene include: UniProt: P10147; NP_002974.1 [human], NP_001005251.2 [canine], NP_001108413.1 [equine], NP_001157129.1 [feline], as well as sequence variants, isoforms encoded by alternative splicing, and various glycoforms thereof. Canonically, the protein encoded by this gene plays a role in inflammatory responses through binding to the receptors CCR1, CCR4 and CCR5. In some instances, and merely for the sake of disambiguation, a prefix is added when referring to the protein or gene of a particular species (with h, c, e, and f, referring to the human, canine, equine, and feline forms, respectively).

[0133] The term “CCL5 gene” refers to a mammalian gene encoding a C-C Motif Chemokine Ligand 5 polypeptide. Non-limiting examples of CCL5 genes include: NCBI Gene ID: 6352 [human], NCBI Gene ID: 403522 [canine], NCBI Gene ID: 100033925 [equine], NCBI Gene ID: 493689 [feline], as well as synonymous and non-synonymous sequence variants thereof. Non-limiting examples of gene products encoded by a CCL5 gene include: UniProt: P13501; NP_001265665.1 [human], NP_001003010.1 [canine], NP_001075332.1 [equine], NP_001009827.1 [feline]) as well as sequence variants, isoforms encoded by alternative splicing, and various glycoforms thereof. Canonically, the protein encoded by this gene functions as a chemoattractant for blood monocytes, memory T helper cells and eosinophils, induces the release of histamine from basophils, and activates eosinophils. In some instances, and merely for the sake of disambiguation, a prefix is added when referring to the protein or gene of a particular species (with h, c, e, and f, referring to the human, canine, equine, and feline forms, respectively).

[0134] The term “CCL7 gene” refers to a mammalian gene encoding a C-C Motif Chemokine Ligand 7 polypeptide. Non-limiting examples of CCL7 genes include: NCBI Gene ID: 6354 [human], NCBI Gene ID: 491148 [canine], NCBI Gene ID: 100071714 [equine], NCBI Gene ID: 101096931 [feline], as well as synonymous and non-synonymous sequence variants thereof. Non-limiting examples of gene products encoded by a CCL7 gene include: UniProt: P80098; NP_006264.2 [human], NP_001010960.1 [canine], XP_005597638.1 [equine], XP_044900774.1 [feline], as well as sequence variants, isoforms encoded by alternative splicing, and various glycoforms thereof. Canonically, the protein encoded by this gene is a secreted chemokine which attracts macrophages during inflammation and metastasis and is an in vivo substrate of MMP2. In some instances, and merely for the sake of disambiguation, a prefix is added when referring to the protein or gene of a particular species (with h, c, e, and f, referring to the human, canine, equine, and feline forms, respectively).

[0135] The term “CCL20 gene” refers to a mammalian gene encoding a C-C Motif Chemokine Ligand 20 polypeptide. Non-limiting examples of CCL20 genes include: NCBI Gene ID: 6364 [human], NCBI Gene ID: 448790 [canine], NCBI Gene ID: 100629808 [equine], NCBI Gene ID: 101089032 [feline], as well as synonymous and non-synonymous sequence variants thereof. Non-limiting examples of gene products encoded by a CCL20 gene include: UniProt: P78556; NP_001123518.1 [human], NP_001005254.1 [canine], XP_003365179.2 [equine], XP 003991274.2 [feline], as well as sequence variants, isoforms encoded by alternative splicing, and various glycoforms thereof. Canonically, the protein encoded by this gene is involved in inflammatory processes and displays chemotactic activity for lymphocytes. In some instances, and merely for the sake of disambiguation, a prefix is added when referring to the protein or gene of a particular species (with h, c, e, and f, referring to the human, canine, equine, and feline forms, respectively).

[0136] The term “CXCR1 gene” refers to a mammalian gene encoding a C-X-C Motif Chemokine Receptor 1 polypeptide. Non-limiting examples of CXCR1 genes include: NCBI Gene ID: 3577 [human], NCBI Gene ID: 478906 [canine], NCBI Gene ID: 100058291 [equine], NCBI Gene ID: 101085650 [feline], as well as synonymous and non-synonymous sequence variants thereof. Non-limiting examples of gene products encoded by a CXCR1 gene include: UniProt: P25024; NP_000625.1 [human], XP_038303849.1 [canine], XP_001491062.1 [equine], XP_011283865.1 [feline], as well as sequence variants, isoforms encoded by alternative splicing, and various glycoforms thereof. Canonically, the protein encoded by this gene is a receptor for IL8 and transduces signaling to mediate neutrophil migration to sites of inflammation, among other activities. In some instances, and merely for the sake of disambiguation, a prefix is added when referring to the protein or gene of a particular species (with h, c, e, and f, referring to the human, canine, equine, and feline forms, respectively).

[0137] The term “CXCR2 gene” refers to a mammalian gene encoding a C-X-C Motif Chemokine Receptor 2 polypeptide. Non-limiting examples of CXCR2 genes include: NCBI Gene ID: 3579 [human], NCBI Gene ID: 478905 [canine], NCBI Gene ID: 100055552 [equine], NCBI Gene ID: 101085396 [feline], as well as synonymous and non-synonymous sequence variants thereof. Non-limiting examples of gene products encoded by a CXCR2 gene include: e.g., UniProt: P25025; NP_001161770.1 [human], NP_001003151.2 [canine], XP_005610662.1 [equine], XP_044890398.1 [feline], as well as sequence variants, isoforms encoded by alternative splicing, and various glycoforms thereof. Canonically, the protein encoded by this gene is a receptor for IL8 and transduces signaling to mediate neutrophil migration to sites of inflammation, among other activities. In some instances, and merely for the sake of disambiguation, a prefix is added when referring to the protein or gene of a particular species (with h, c, e, and f, referring to the human, canine, equine, and feline forms, respectively).

[0138] The term “CCR7 gene” refers to a mammalian gene encoding a C-C Motif Chemokine Receptor 7 polypeptide. Non-limiting examples of CCR7 genes include: NCBI Gene ID: 1236 [human], NCBI Gene ID: 491011 [canine], NCBI Gene ID: 100067673 [equine], NCBI Gene ID: 101084327 [feline], as well as synonymous and non-synonymous sequence variants thereof. Non-limiting examples of gene products encoded by a CCR7 gene include: UniProt: P32248; NP_001288643.1 [human], XP_038403305.1 [canine], XP_001500231.1 [equine], XP_003996882.1 [feline], as well as sequence variants, isoforms encoded by alternative splicing, and various glycoforms thereof. Canonically, the protein encoded by this gene controls the migration of memory T cells to inflamed tissues, as well as stimulate dendritic cell maturation. Signals mediated by this receptor may also function in chronic inflammation pathogenesis. In some instances, and merely for the sake of disambiguation, a prefix is added when referring to the protein or gene of a particular species (with h, c, e, and f, referring to the human, canine, equine, and feline forms, respectively).

[0139] The term “ADAM17 gene” refers to a mammalian gene encoding an ADAM Metallopeptidase Domain 17 polypeptide. Non-limiting examples of ADAM17 genes include: NCBI Gene ID: 6868 [human], NCBI Gene ID: 475662 [canine], NCBI Gene ID: 100072496 [equine], NCBI Gene ID: 101089004 [feline], as well as synonymous and non-synonymous sequence variants thereof. Non-limiting examples of gene products encoded by a ADAM17 gene include: UniProt: P78536; NP_001369706.1 [human], NP_001273795.1 [canine], NP_001295481.1 [equine], XP_003984558.1 [feline], as well as sequence variants, isoforms encoded by alternative splicing, and various glycoforms thereof. Canonically, the protein encoded by these genes is proteolytically processed to generate a mature protease, which functions by shedding the ectodomain of tumor necrosis factor-alpha, thereby releasing soluble tumor necrosis factor-alpha from its membrane-bound precursor. In some instances, and merely for the sake of disambiguation, a prefix is added when referring to the protein or gene of a particular species (with h, c, e, and f referring to the human, canine, equine, and feline forms, respectively).

[0140] The term “TNF gene” refers to a mammalian gene encoding a Tumor Necrosis Factor polypeptide. Non-limiting examples of TNF genes include: NCBI Gene ID: 7124 [human], NCBI Gene ID: 403922 [canine], NCBI Gene ID: 100033834 [equine], NCBI Gene ID: 493755 [feline], as well as synonymous and non-synonymous sequence variants thereof. Non-limiting examples of gene products encoded by a TNF gene include: UniProt: P01375; NP_000585.2 [human], NP_001003244.4 [canine], NP_001075288.2 [equine], NP_001009835.1 [feline], as well as sequence variants, isoforms encoded by alternative splicing, and various glycoforms thereof. Canonically, the protein encoded by these genes is a multifunctional proinflammatory cytokine that is mainly secreted by macrophages and can bind (and therefore function through) its receptors TNFRSF1A and TNFRSF1B. In some instances, and merely for the sake of disambiguation, a prefix is added when referring to the protein or gene of a particular species (with h, c, e, and f referring to the human, canine, equine, and feline forms, respectively).

[0141] The term “TNFRSF1A gene” refers to a mammalian gene encoding a Tumor Necrosis Factor Receptor 1 polypeptide. Non-limiting examples of TNFRSF1A genes include: NCBI Gene ID: 7132 [human], NCBI Gene ID: 403634 [canine], NCBI Gene ID: 100059548 [equine], NCBI Gene ID: 493957 [feline], as well as synonymous and non-synonymous sequence variants thereof. Non-limiting examples of gene products encoded by a TNFRSF1A gene include: UniProt: P19438; NP_001056.1 [human], XP_038295153.1 [canine], XP_023498787.1 [equine], NP_001009361.1 [feline], as well as sequence variants, isoforms encoded by alternative splicing, and various glycoforms thereof. Canonically, the proteins encoded by the genes listed above are transmembrane receptor proteins capable of binding Tumor Necrosis Factor Alpha (TNFA) or lymphotoxin alpha (LTA), its principal ligand. Upon binding to TNFA, the receptor trimerizes and is activated, transmitting intracellular signaling cascades with role in various processes, including apoptosis and inflammation. See generally, Ward-Kavanagh, L. K., et al. (2016). Immunity, 44(5), 1005-1019. In some instances, and merely for the sake of disambiguation, a prefix is added when referring to the protein or gene of a particular species (with h, c, e, and f referring to the human, canine, equine, and feline forms, respectively).

[0142] The term “TNFRSF1B gene” refers to a mammalian gene encoding a Tumor Necrosis Factor Receptor 2 polypeptide. Non-limiting examples of TNFRSF1B genes include: NCBI Gene ID: 7133 [human], NCBI Gene ID: 487437 [canine], NCBI Gene ID: 100055840 [equine], NCBI Gene ID: 101080392 [feline], as well as synonymous and non-synonymous sequence variants thereof. Non-limiting examples of gene products encoded by a TNFRSF1B gene include: UniProt: P20333; XP_011540362.1 [human], XP_038387905.1 [canine], XP_023491528.1 [equine]. XP_023113905.2 [feline], as well as sequence variants, isoforms encoded by alternative splicing, and various glycoforms thereof. Canonically, the proteins encoded by the genes listed above are transmembrane receptor proteins capable of binding TNFA or LTA and are implicated in pro-survival pathways through downstream activation of NFkB pathway. See generally, Ward-Kavanagh, L. K., et al. (2016). Immunity, 44(5), 1005-1019. In some instances, and merely for the sake of disambiguation, a prefix is added when referring to the protein or gene of a particular species (with h, c, e, and f, referring to the human, canine, equine, and feline forms, respectively).

[0143] The terms “IL4 gene” refers to a mammalian gene encoding an Interleukin 4 polypeptide. Non-limiting examples of IL4 genes include: NCBI Gene ID: 3565 [human], NCBI Gene ID: 403785 [canine], NCBI Gene ID: 100034225 [equine], NCBI Gene ID: 751514 [feline], as well as synonymous and non-synonymous sequence variants thereof. Non-limiting examples of gene products encoded by a IL4 gene include: UniProt: P05112; NP_000580.1 [human], NP_001003159.1 [canine], NP_001075988.1 [equine], NP_001036804.1 [feline], as well as sequence variants, isoforms encoded by alternative splicing, and various glycoforms thereof. Canonically, the protein encoded by these genes is a pleiotropic cytokine produced by activated T cells and is considered an important cytokine for tissue repair, counterbalancing the effects of proinflammatory type 1 cytokines, though it also promotes allergic airway inflammation and mediates acute inflammation, among other activities. In some instances, and merely for the sake of disambiguation, a prefix is added when referring to the protein or gene of a particular species (with h, c, e, and f, referring to the human, canine, equine, and feline forms, respectively).

[0144] The terms “IL4R gene” refers to a mammalian gene encoding an Interleukin 4 Receptor polypeptide. Non-limiting examples of IL4R genes include: NCBI Gene ID: 3566 [human], NCBI Gene ID: 489957 [canine], NCBI Gene ID: 791252 [equine], NCBI Gene ID: 101096277 [feline], as well as synonymous and non-synonymous sequence variants thereof. Non-limiting examples of gene products encoded by a IL4R gene include: UniProt: P24394; NP_000409.1 [human], NP_001003159.1 [canine], XP_005598791.2 [equine], XP_023102076.2 [feline], as well as sequence variants, isoforms encoded by alternative splicing, and various glycoforms thereof. Canonically, the protein encoded by these genes is a type I transmembrane protein that can bind interleukin 4 and interleukin 13 to regulate IgE production and promote differentiation of Th2 cells, among other activities. In some instances, and merely for the sake of disambiguation, a prefix is added when referring to the protein or gene of a particular species (with h, c, e, and f, referring to the human, canine, equine, and feline forms, respectively).

[0145] The terms “IL6 gene” refers to a mammalian gene encoding an Interleukin 6 polypeptide. Non-limiting examples of IL6 genes include: NCBI Gene ID: 3569 [human], NCBI Gene ID: 403985 [canine], NCBI Gene ID: 100034196 [equine], NCBI Gene ID: 493687 [feline], as well as synonymous and non-synonymous sequence variants thereof. Non-limiting examples of gene products encoded by a IL6 gene include: UniProt: P05231; NP_000591.1 [human], NP_001003301.1 [canine], NP_001075965.2 [equine], NP_001009211.2 [feline], as well as sequence variants, isoforms encoded by alternative splicing, and various glycoforms thereof. Canonically, the protein encoded by these genes is a cytokine that functions in inflammation and the maturation of B cells that is primarily produced at sites of acute and chronic inflammation, where it is secreted into the serum and induces a transcriptional inflammatory response through interleukin 6 receptor. In some instances, and merely for the sake of disambiguation, a prefix is added when referring to the protein or gene of a particular species (with h, c, e, and f, referring to the human, canine, equine, and feline forms, respectively).

[0146] The term “IL6R gene” refers to a mammalian gene encoding an Interleukin-6 Receptor polypeptide. Non-limiting examples of IL6R genes include: NCBI Gene ID: 3560 [human], NCBI Gene ID: 612271 [canine], NCBI Gene ID: 102148787 [equine], NCBI Gene ID: 101085689 [feline], as well as synonymous and non-synonymous sequence variants thereof. Non-limiting examples of gene products encoded by a IL6R gene include: UniProt: P08887; CAA41231.1 [human], XP_038527979.1 [canine], XP_023496854.1 [equine], XP_023103841.2 [feline], as well as sequence variants, isoforms encoded by alternative splicing, and various glycoforms thereof. Canonically, the proteins encoded by the genes listed above are transmembrane proteins capable of binding to interleukin-6, its native ligand. This binding event triggers intracellular signaling events that result in pro-inflammatory responses. See generally, Wolf, J., et al. (2014). Cytokine, 70(1), 11-20. In some instances, and merely for the sake of disambiguation, a prefix is added when referring to the protein or gene of a particular species (with h, c, e, and f, referring to the human, canine, equine, and feline forms, respectively).

[0147] The terms “IL6ST gene” refers to a mammalian gene encoding an Interleukin-6 Cytokine Family Signal Transducer polypeptide. Non-limiting examples of IL6ST genes include: NCBI Gene ID: 3572 [human], NCBI Gene ID: 403545 [canine], NCBI Gene ID: 100051700 [equine], NCBI Gene ID: 101089832 [feline], as well as synonymous and non-synonymous sequence variants thereof. Non-limiting examples of gene products encoded by an IL6ST gene include: UniProt: P40189; NP_001177910.1 [human], NP_001273950.1 [canine], XP_023481030.1 [equine], XP_011281205.1 [feline]), as well as sequence variants, isoforms encoded by alternative splicing, and various glycoforms thereof. Canonically, the proteins encoded by the genes listed above are signal transducers shared by many cytokines, including interleukin 6 (IL6), ciliary neurotrophic factor (CNTF), leukemia inhibitory factor (LIF), and oncostatin M (OSM) and function as a part of the cytokine receptor complex. Activation of this protein is dependent upon the binding of cytokines to their receptors (e.g., IL6 to IL6R). Knockout studies in mice suggest that this gene plays a critical role in regulating myocyte apoptosis. See generally, Martinez-Perez, C., et al. (2021). Journal of Personalized Medicine, 11(7), 618. In some instances, and merely for the sake of disambiguation, a prefix is added when referring to the protein or gene of a particular species (with h, c, e, and f, referring to the human, canine, equine, and feline forms, respectively.

[0148] The terms “IL10 gene” refers to a mammalian gene encoding an Interleukin 10 polypeptide. Non-limiting examples of IL10 genes include: NCBI Gene ID: 3586 [human], NCBI Gene ID: 403628 [canine], NCBI Gene ID: 100034187 [equine], NCBI Gene ID: 493683 [feline], as well as synonymous and non-synonymous sequence variants thereof. Non-limiting examples of gene products encoded by a IL10 gene include: UniProt: P22301; NP_000563.1 [human], NP_001003077.1 [canine], NP_001075959.1 [equine], NP_001009209.1 [feline], as well as sequence variants, isoforms encoded by alternative splicing, and various glycoforms thereof. Canonically, the protein encoded by these genes is a pleiotropic cytokine that regulates inflammation and acts on many immune cell types through binding to its heterodimeric receptor composed of IL10RA and IL10RB, thereby activating downstream signaling cascades, such as the JAK-STAT pathway. In some instances, and merely for the sake of disambiguation, a prefix is added when referring to the protein or gene of a particular species (with h, c, e, and f, referring to the human, canine, equine, and feline forms, respectively).

[0149] The term “IL10RA gene” refers to a mammalian gene encoding a Interleukin 10 Receptor Alpha polypeptide. Non-limiting examples of IL10RA genes include: NCBI Gene ID: 3587 [human], NCBI Gene ID: 610823 [canine], NCBI Gene ID: 100071172 [equine], NCBI Gene ID: 101087601 [feline], as well as synonymous and non-synonymous sequence variants thereof. Non-limiting examples of gene products encoded by a IL10RA gene include: UniProt: Q13651; NP_001549.2 [human], XP_038520677.1 [canine], XP_014596783.1 [equine], XP_003992449.1 [feline], as well as sequence variants, isoforms encoded by alternative splicing, and various glycoforms thereof. Canonically, the protein encoded by these genes is, upon forming a heterodimer with IL10RB, a regulator of pro-inflammatory signaling through the binding of its ligand IL-10. In some instances, and merely for the sake of disambiguation, a prefix is added when referring to the protein or gene of a particular species (with h, c, e, and f referring to the human, canine, equine, and feline forms, respectively).

[0150] The term “IL10RB gene” refers to a mammalian gene encoding an Interleukin 10 Receptor Beta polypeptide. Non-limiting examples of IL10RB genes include: NCBI Gene ID: 3588 [human], NCBI Gene ID: 478404 [canine], NCBI Gene ID: 100052549 [equine], NCBI Gene ID: 101090038 [feline], as well as synonymous and non-synonymous sequence variants thereof. Non-limiting examples of gene products encoded by a IL10RB gene include: UniProt: Q08334; NP_000619.3 [human], XP_038299308.1 [canine], XP_023485821.1 [equine], XP_003991512.2 [feline], as well as sequence variants, isoforms encoded by alternative splicing, and various glycoforms thereof. Canonically, the protein encoded by these genes is, upon forming a heterodimer with IL10RA, a regulator of pro-inflammatory signaling through the binding of its ligand IL-10. In some instances, and merely for the sake of disambiguation, a prefix is added when referring to the protein or gene of a particular species (with h, c, e, and f referring to the human, canine, equine, and feline forms, respectively).

[0151] The term “IL13 gene” refers to a mammalian gene encoding an Interleukin 13 polypeptide. Non-limiting examples of IL13 genes include: NCBI Gene ID: 3596 [human], NCBI Gene ID: 442990 [canine], NCBI Gene ID: 100034113 [equine], NCBI Gene ID: 101084678 [feline], as well as synonymous and non-synonymous sequence variants thereof. Non-limiting examples of gene products encoded by a IL13 gene include: UniProt: P35225; NP_001341920.1 [human], NP 001003384.1 [canine], NP_001137263.1 [equine], NP_001009209.1 [feline], as well as sequence variants, isoforms encoded by alternative splicing, and various glycoforms thereof. Canonically, the protein encoded by these genes regulates of the production of pro-inflammatory cytokines and chemokines. In some instances, and merely for the sake of disambiguation, a prefix is added when referring to the protein or gene of a particular species (with h, c, e, and f referring to the human, canine, equine, and feline forms, respectively).

[0152] The term “IL13RA1 gene” refers to a mammalian gene encoding an Interleukin 13 Receptor Alpha 1 polypeptide. Non-limiting examples of IL13RA1 genes include: NCBI Gene ID: 3597 [human], NCBI Gene ID: 403623 [canine], NCBI Gene ID: 100055312 [equine], NCBI Gene ID: 101091351 [feline], as well as synonymous and non-synonymous sequence variants thereof. Non-limiting examples of gene products encoded by a IL13RA1 gene include: UniProt: P78552; NP_001551.1 [human], XP_038306633.1 [canine], XP_023490026.1 [equine], XP_023104651.1 [feline], as well as sequence variants, isoforms encoded by alternative splicing, and various glycoforms thereof. Canonically, the protein encoded by these genes is a low affinity binding partner of IL13 and comprises a functional receptor once associated with of IL13RA2. Once bound to IL13, the receptor complex stimulates the production of pro-inflammatory cytokines and chemokines. In some instances, and merely for the sake of disambiguation, a prefix is added when referring to the protein or gene of a particular species (with h, c, e, and f referring to the human, canine, equine, and feline forms, respectively).

[0153] The term “IL13RA2 gene” refers to a mammalian gene encoding an Interleukin 13 Receptor Alpha 2 polypeptide. Non-limiting examples of IL13RA2 genes include: NCBI Gene ID: 3598 [human], NCBI Gene ID: 403622 [canine], NCBI Gene ID: 100057673 [equine], NCBI Gene ID: 101100114 [feline], as well as synonymous and non-synonymous sequence variants thereof. Non-limiting examples of gene products encoded by a IL13RA2 gene include: UniProt: Q14627; NP_000631.1 [human], NP_001003075.1 [canine], XP_023489189.1 [equine], XP_044906881.1 [feline], as well as sequence variants, isoforms encoded by alternative splicing, and various glycoforms thereof. Canonically, the protein encoded by these genes is a high affinity binding partner of IL13 but lacks a cytoplasmic domain. Along with IL13RA1, it forms a functional receptor that stimulates the production of pro-inflammatory cytokines and chemokines. In some instances, and merely for the sake of disambiguation, a prefix is added when referring to the protein or gene of a particular species (with h, c, e, and f referring to the human, canine, equine, and feline forms, respectively).

[0154] The term “IL17A gene” refers to a mammalian gene encoding an Interleukin 17A polypeptide. Non-limiting examples of IL17A genes include: NCBI Gene ID: 3605 [human], NCBI Gene ID: 481837 [canine], NCBI Gene ID: 100034142 [equine], NCBI Gene ID: 101095339 [feline], as well as synonymous and non-synonymous sequence variants thereof. Non-limiting examples of gene products encoded by a IL17A gene include: UniProt: Q16552; NP_002181.1 [human], NP_001159350.1 [canine], NP_001137264.1 [equine], XP_006931878.1 [feline], as well as sequence variants, isoforms encoded by alternative splicing, and various glycoforms thereof. Canonically, the protein encoded by these genes is an inflammatory cytokine that activates the NF kappa B signaling pathway through interactions with its heterodimeric receptor complex of IL17RA and IL17RC, thereby activating transcription of various chemokines, cytokines and other factors. In some instances, and merely for the sake of disambiguation, a prefix is added when referring to the protein or gene of a particular species (with h, c, e, and f, referring to the human, canine, equine, and feline forms, respectively).

[0155] The term “IL17RA gene” refers to a mammalian gene encoding an Interleukin 17 Receptor A polypeptide. Non-limiting examples of IL17RA genes include: NCBI Gene ID: 23765 [human], NCBI Gene ID: 486759 [canine], NCBI Gene ID: 100055511 [equine], NCBI Gene ID: 101095588 [feline], as well as synonymous and non-synonymous sequence variants thereof. Non-limiting examples of gene products encoded by a IL17RA gene include: UniProt: Q96F46; NP_001276834.1 [human], XP_038295433.1 [canine], XP_005610881.1 [equine], XP_023112364.2 [feline], as well as sequence variants, isoforms encoded by alternative splicing, and various glycoforms thereof. Canonically, the protein encoded by these genes is a transmembrane protein that binds to IL17A with low affinity as part of a multimeric receptor complex. With its ligand, IL17RA is implicated in many inflammatory conditions. In some instances, and merely for the sake of disambiguation, a prefix is added when referring to the protein or gene of a particular species (with h, c, e, and f referring to the human, canine, equine, and feline forms, respectively).

[0156] The term “IL18 gene” refers to a mammalian gene encoding an Interleukin 18 polypeptide. Non-limiting examples of IL18 genes include: NCBI Gene ID: 3606 [human], NCBI Gene ID: 403796 [canine], NCBI Gene ID: 100034216 [equine], NCBI Gene ID: 493688 [feline], as well as synonymous and non-synonymous sequence variants thereof. Non-limiting examples of gene products encoded by a IL18 gene include: UniProt: Q14116; NP_001230140.1 [human], XP 038520002.1 [canine], XP_005611483.1 [equine], NP_001009213.2 [feline], as well as sequence variants, isoforms encoded by alternative splicing, and various glycoforms thereof. Canonically, the protein encoded by these genes is a pro-inflammatory cytokine that regulates inflammatory signaling through the NF kappa B pathway when engaged with its receptor and co-receptor, IL18R1 and IL18RAP. In some instances, and merely for the sake of disambiguation, a prefix is added when referring to the protein or gene of a particular species (with h, c, e, and f, referring to the human, canine, equine, and feline forms, respectively).

[0157] The term “IL18R1 gene” refers to a mammalian gene encoding an Interleukin 18 Receptor 1 polypeptide. Non-limiting examples of IL18R1 genes include: NCBI Gene ID: 8809 [human], NCBI Gene ID: 611438 [canine], NCBI Gene ID: 100058269 [equine], NCBI Gene ID: 493938 [feline], as well as synonymous and non-synonymous sequence variants thereof. Non-limiting examples of gene products encoded by a IL18R1 gene include: UniProt: Q13478; NP_001269328.1 [human], XP_038536128.1 [canine], XP_023474273.1 [equine], NP_001009863.2 [feline], as well as sequence variants, isoforms encoded by alternative splicing, and various glycoforms thereof. Canonically, the protein encoded by these genes is an essential component for transducing IL18-mediated pro-inflammatory signaling. In some instances, and merely for the sake of disambiguation, a prefix is added when referring to the protein or gene of a particular species (with h, c, e, and f referring to the human, canine, equine, and feline forms, respectively).

[0158] The term “IL18RAP gene” refers to a mammalian gene encoding an Interleukin 18 Receptor Accessory Protein polypeptide. Non-limiting examples of IL18RAP genes include: NCBI Gene ID: 8807 [human], NCBI Gene ID: 481327 [canine], NCBI Gene ID: 100050212 [equine], NCBI Gene ID: 101084868 [feline], as well as synonymous and non-synonymous sequence variants thereof. Non-limiting examples of gene products encoded by a IL18RAP gene include: UniProt: Q53TU5; NP_001380415.1 [human], XP_038536125.1 [canine], XP_014586460.1 [equine], XP_019682529.2 [feline], as well as sequence variants, isoforms encoded by alternative splicing, and various glycoforms thereof. Canonically, the protein encoded by these genes is an accessory protein that enhances the signal transduction of IL18-mediated pro-inflammatory signaling. In some instances, and merely for the sake of disambiguation, a prefix is added when referring to the protein or gene of a particular species (with h, c, e, and f, referring to the human, canine, equine, and feline forms, respectively).

[0159] The term “NGF gene” refers to a mammalian gene encoding a Nerve Growth Factor polypeptide. Non-limiting examples of NGF genes include: NCBI Gene ID: 4803 [human], NCBI Gene ID: 403402 [canine], NCBI Gene ID: 100065669 [equine], NCBI Gene ID: 100144611 [feline], as well as synonymous and non-synonymous sequence variants thereof. Non-limiting examples of gene products encoded by a NGF gene include: UniProt: P01138; NP_002497.2 [human], XP_038546347.1 [canine], XP_001496237.2 [equine], XP_044889256.1 [feline], as well as sequence variants, isoforms encoded by alternative splicing, and various glycoforms thereof. Canonically, this secreted protein forms a functional homodimer that is incorporated into a larger complex and has nerve growth stimulating activity. The complex is also involved in the regulation of growth and the differentiation of sympathetic and certain sensory neurons. In some instances, and merely for the sake of disambiguation, a prefix is added when referring to the protein or gene of a particular species (with h, c, e, and f, referring to the human, canine, equine, and feline forms, respectively).

[0160] The term “NGFR gene” refers to a mammalian gene encoding a Nerve Growth Factor Receptor polypeptide. Non-limiting examples of NGFR genes include: NCBI Gene ID: 4804 [human], NCBI Gene ID: 491071 [canine], NCBI Gene ID: 100069694 [equine], NCBI Gene ID: 101101519 [feline], as well as synonymous and non-synonymous sequence variants thereof. Non-limiting examples of gene products encoded by a NGFR gene include: UniProt: P08138; NP_002498.1 [human], XP_038531049.1 [canine], XP_023508464.1 [equine], XP_023099534.1 [feline], as well as sequence variants, isoforms encoded by alternative splicing, and various glycoforms thereof. Canonically, the protein encoded by these genes contains four 40-amino acid repeats within its extracellular domain with 6 cysteine residues at conserved positions followed by a serine/threonine-rich region. This cysteine-rich region contains the nerve growth factor binding domain and allows for signal transduction once bound. In some instances, and merely for the sake of disambiguation, a prefix is added when referring to the protein or gene of a particular species (with h, c, e, and f, referring to the human, canine, equine, and feline forms, respectively).

[0161] The term “NTF3 gene” refers to a mammalian gene encoding a Neurotrophin-3 polypeptide. Non-limiting examples of NTF3 genes include: NCBI Gene ID: 4908 [human], NCBI Gene ID: 493963 [canine], NCBI Gene ID: 100051839 [equine], NCBI Gene ID: 486731 [feline], as well as synonymous and non-synonymous sequence variants thereof. Non-limiting examples of gene products encoded by a NTF3 gene include: UniProt: P20783; NP_001096124.1 [human], XP 038293846.1 [canine], XP_023498780.1 [equine], NP_001009367.1 [feline], as well as sequence variants, isoforms encoded by alternative splicing, and various glycoforms thereof. Canonically, the protein encoded by these genes controls survival and differentiation of neurons. In some instances, and merely for the sake of disambiguation, a prefix is added when referring to the protein or gene of a particular species (with h, c, e, and f referring to the human, canine, equine, and feline forms, respectively).

[0162] The term “NTF4 gene” refers to a mammalian gene encoding a Neurotrophin-4 polypeptide. Non-limiting examples of NTF4 genes include: NCBI Gene ID: 4909 [human], NCBI Gene ID: 611987 [canine], NCBI Gene ID: 100054859 [equine], NCBI Gene ID: 101100428 [feline], as well as synonymous and non-synonymous sequence variants thereof. Non-limiting examples of gene products encoded by a NTF4 gene include: UniProt: P34130; NP_001382418.1 [human], NP 001177358.2 [canine], XP_023505846.1 [equine], XP_023101354.2 [feline], as well as sequence variants, isoforms encoded by alternative splicing, and various glycoforms thereof. Canonically, the protein encoded by these genes is proteolytically processed to a mature form, which can promote survival of neurons through binding of its cognate receptor. Dysregulation of this protein is observed in various neurological disorders. In some instances, and merely for the sake of disambiguation, a prefix is added when referring to the protein or gene of a particular species (with h, c, e, and f referring to the human, canine, equine, and feline forms, respectively).

[0163] The term “NTRK1 gene” refers to a mammalian gene encoding a Neurotrophic Receptor Tyrosine Kinase 1 polypeptide. Non-limiting examples of NTRK1 genes include: NCBI Gene ID: 4914 [human], NCBI Gene ID: 490404 [canine], NCBI Gene ID: 100064594 [equine], NCBI Gene ID: 101081603 [feline], as well as synonymous and non-synonymous sequence variants thereof. Non-limiting examples of gene products encoded by a NTRK1 gene include: UniProt: P04629; NP_001007793.1 [human], XP 038527745.1 [canine], XP_023496742.1 [equine], XP_023103311.1 [feline], as well as sequence variants, isoforms encoded by alternative splicing, and various glycoforms thereof. Canonically, the protein encoded by these genes is a membrane-bound receptor that binds neutrophin and signals through the MAPK pathway to regulate cell differentiation, among other functions. In some instances, and merely for the sake of disambiguation, a prefix is added when referring to the protein or gene of a particular species (with h, c, e, and f referring to the human, canine, equine, and feline forms, respectively).

[0164] The term “NTRK2 gene” refers to a mammalian gene encoding a Neurotrophic Receptor Tyrosine Kinase 2 polypeptide. Non-limiting examples of NTRK2 genes include: NCBI Gene ID: 4915 [human], NCBI Gene ID: 484147 [canine], NCBI Gene ID: 100061700 [equine], NCBI Gene ID: 101101347 [feline], as well as synonymous and non-synonymous sequence variants thereof. Non-limiting examples of gene products encoded by a NTRK2 gene include: UniProt: Q16620; NP_001007098.1 [human], XP 038510982.1 [canine], XP_023482906.1 [equine], XP_023097987.1 [feline], as well as sequence variants, isoforms encoded by alternative splicing, and various glycoforms thereof. Canonically, the protein encoded by these genes is a membrane-bound receptor that binds neutrophin and signals through the MAPK pathway to regulate cell differentiation, among other functions. In some instances, and merely for the sake of disambiguation, a prefix is added when referring to the protein or gene of a particular species (with h, c, e, and f referring to the human, canine, equine, and feline forms, respectively).

[0165] The term “BDNF gene” refers to a mammalian gene encoding a Brain-Derived Neurotrophic Factor polypeptide. Non-limiting examples of BDNF genes include: NCBI Gene ID: 627 [human], NCBI Gene ID: 403461 [canine], NCBI Gene ID: 100009689 [equine], NCBI Gene ID: 493690 [feline], as well as synonymous and non-synonymous sequence variants thereof. Non-limiting examples of gene products encoded by a BDNF gene include: UniProt: P23560; NP_001137277.1 [human], NP_001002975.1 [canine], NP_001075256.1 [equine], NP_001009828.1 [feline], as well as sequence variants, isoforms encoded by alternative splicing, and various glycoforms thereof. Canonically, the protein encoded by these genes is proteolytically processed to a mature form, which can promote survival of neurons through binding of its cognate receptor. Dysregulation of this protein is observed in various neurological disorders. In some instances, and merely for the sake of disambiguation, a prefix is added when referring to the protein or gene of a particular species (with h, c, e, and f referring to the human, canine, equine, and feline forms, respectively).

[0166] The terms “SCN1A gene” refers to a mammalian gene encoding a Sodium Voltage-Gated Channel Alpha 1 polypeptide. Non-limiting examples of SCN1A genes include: NCBI Gene ID: 6323 [human], NCBI Gene ID: 478775 [canine], NCBI Gene ID: 100052059 [equine], NCBI Gene ID: 101081823 [feline], as well as synonymous and non-synonymous sequence variants thereof. Non-limiting examples of gene products encoded by a SCN1A gene include: UniProt: P35498; NP_001159435.1 [human], XP_038302870.1 [canine], XP_023478839.1 [equine], XP_019693764.1 [feline], as well as sequence variants, isoforms encoded by alternative splicing, and various glycoforms thereof. Canonically, the protein encoded by these genes mediates the voltage-dependent sodium ion permeability of excitable membranes and is involved in sensory perception of mechanical pain (i.e., activation in somatosensory neurons has been shown to induce pain without neurogenic inflammation). In some instances, and merely for the sake of disambiguation, a prefix is added when referring to the protein or gene of a particular species (with h, c, e, and f referring to the human, canine, equine, and feline forms, respectively).

[0167] The terms “SCN2A gene” refers to a mammalian gene encoding a Sodium Voltage-Gated Channel Alpha 2 polypeptide. Non-limiting examples of SCN2A genes include: NCBI Gene ID: 6326 [human], NCBI Gene ID: 478773 [canine], NCBI Gene ID: 100051816 [equine], NCBI Gene ID: 101080472 [feline], as well as synonymous and non-synonymous sequence variants thereof. Non-limiting examples of gene products encoded by a SCN2A gene include: UniProt: Q99250; NP_001035232.1 [human], XP 038302857.1 [canine], XP_023478830.1 [equine], XP_023115179.1 [feline], as well as sequence variants, isoforms encoded by alternative splicing, and various glycoforms thereof. Canonically, the protein encoded by these genes mediates the voltage-dependent sodium ion permeability of excitable membranes. In some instances, and merely for the sake of disambiguation, a prefix is added when referring to the protein or gene of a particular species (with h, c, e, and f, referring to the human, canine, equine, and feline forms, respectively).

[0168] The term “SCN3A gene” refers to a mammalian gene encoding a Sodium Voltage-Gated Channel Alpha 3 polypeptide. Non-limiting examples of SCN3A genes include: NCBI Gene ID: 6328 [human], NCBI Gene ID: 478772 [canine], NCBI Gene ID: 100061941 [equine], NCBI Gene ID: 101082587 [feline], as well as synonymous and non-synonymous sequence variants thereof. Non-limiting examples of gene products encoded by a SCN3A gene include: UniProt: Q9NY46; NP_001075145.1 [human], XP_038302852.1 [canine], XP_023478823.1 [equine], XP_019693750.1 [feline], as well as sequence variants, isoforms encoded by alternative splicing, and various glycoforms thereof. Canonically, the protein encoded by these genes is a subunit of voltage-gated sodium channels and is responsible for propagation of action potentials in neurons and muscle tissue. In some instances, and merely for the sake of disambiguation, a prefix is added when referring to the protein or gene of a particular species (with h, c, e, and f, referring to the human, canine, equine, and feline forms, respectively).

[0169] The terms “SCN4A gene” refers to a mammalian gene encoding a Sodium Voltage-Gated Channel Alpha 4 polypeptide. Non-limiting examples of SCN4A genes include: NCBI Gene ID: 6328 [human], NCBI Gene ID: 119873250 [canine], NCBI Gene ID: 100049793 [equine], NCBI Gene ID: 101098669 [feline], as well as synonymous and non-synonymous sequence variants thereof. Non-limiting examples of gene products encoded by a SCN4A gene include: UniProt: Q9NY46; NP_001075145.1 [human], XP_038531923.1 [canine], NP_001075230.2 [equine], XP_006940553.1 [feline], as well as sequence variants, isoforms encoded by alternative splicing, and various glycoforms thereof. Canonically, the protein encoded by these genes is a subunit of voltage-gated sodium channels and is responsible for propagation of action potentials in neurons and muscle tissue. In some instances, and merely for the sake of disambiguation, a prefix is added when referring to the protein or gene of a particular species (with h, c, e, and f, referring to the human, canine, equine, and feline forms, respectively).

[0170] The terms “SCN5A gene” refers to a mammalian gene encoding a Sodium Voltage-Gated Channel Alpha 5 polypeptide. Non-limiting examples of SCN5A genes include: NCBI Gene ID: 6331 [human], NCBI Gene ID: 403497 [canine], NCBI Gene ID: 100034027 [equine], NCBI Gene ID: 101100994 [feline], as well as synonymous and non-synonymous sequence variants thereof. Non-limiting examples of gene products encoded by a SCN5A gene include: UniProt: Q14524; NP_000326.2 [human], NP_001002994.1 [canine], NP_001157367.1 [equine], XP_044893792.1 [feline], as well as sequence variants, isoforms encoded by alternative splicing, and various glycoforms thereof. Canonically, the protein encoded by these genes is a subunit of voltage-gated sodium channels and is found primarily in cardiac muscle and is responsible for the initial upstroke of the action potential in an electrocardiogram. In some instances, and merely for the sake of disambiguation, a prefix is added when referring to the protein or gene of a particular species (with h, c, e, and f, referring to the human, canine, equine, and feline forms, respectively).

[0171] The term “SCN8A gene” refers to a mammalian gene encoding a Sodium Voltage-Gated Channel Alpha 8 polypeptide. Non-limiting examples of SCN8A genes include: NCBI Gene ID: 6335 [human], NCBI Gene ID: 477604 [canine], NCBI Gene ID: 100052777 [equine], NCBI Gene ID: 101096578 [feline], as well as synonymous and non-synonymous sequence variants thereof. Non-limiting examples of gene products encoded by a SCN8A gene include: UniProt: Q9UQD0; NP_001171455.1 [human], XP_038294063.1 [canine], XP_023499351.1 [equine], XP_023112849.1 [feline], as well as sequence variants, isoforms encoded by alternative splicing, and various glycoforms thereof. Canonically, the protein encoded by these genes is the ion pore subunit of the voltage-gated sodium channel and is essential for rapid membrane depolarization during neuronal action potentials. In some instances, and merely for the sake of disambiguation, a prefix is added when referring to the protein or gene of a particular species (with h, c, e, and f, referring to the human, canine, equine, and feline forms, respectively).

[0172] The term “SCN9A gene” refers to a mammalian gene encoding a Sodium Voltage-Gated Channel Alpha 9 polypeptide. Non-limiting examples of SCN9A genes include: NCBI Gene ID: 6335 [human], NCBI Gene ID: 100855710 [canine], NCBI Gene ID: 100052120 [equine], NCBI Gene ID: 101082841 [feline], as well as synonymous and non-synonymous sequence variants thereof. Non-limiting examples of gene products encoded by a SCN9A gene include: UniProt: Q15858; NP_001352465.1 [human], XP_038302872.1 [canine], XP_023478844.1 [equine], XP_044889827.1 [feline], as well as sequence variants, isoforms encoded by alternative splicing, and various glycoforms thereof. Canonically, the protein encoded by these genes is a voltage-dependent sodium ion channel that has been associated with various pain disorders, especially in the development of inflammatory pain. In some instances, and merely for the sake of disambiguation, a prefix is added when referring to the protein or gene of a particular species (with h, c, e, and f, referring to the human, canine, equine, and feline forms, respectively).

[0173] The term “SCN10A gene” refers to a mammalian gene encoding a Sodium Voltage-Gated Channel Alpha 10 polypeptide. Non-limiting examples of SCN10A genes include: NCBI Gene ID: 6336 [human], NCBI Gene ID: 477026 [canine], NCBI Gene ID: 100055493 [equine], NCBI Gene ID: 101085569 [feline], as well as synonymous and non-synonymous sequence variants thereof. Non-limiting examples of gene products encoded by a SCN10A gene include: UniProt: Q9Y5Y9; NP_001280235.2 [human], NP_001003203.1 [canine], XP_014587037.1 [equine], XP_044893784.1 [feline], as well as sequence variants, isoforms encoded by alternative splicing, and various glycoforms thereof. Canonically, the protein encoded by these genes is a membrane-spanning subunit of voltage-dependent sodium channels that may be involved in the onset of pain associated with neuropathies. In some instances, and merely for the sake of disambiguation, a prefix is added when referring to the protein or gene of a particular species (with h, c, e, and f, referring to the human, canine, equine, and feline forms, respectively).

[0174] The term “SCN11A gene” refers to a mammalian gene encoding a Sodium Voltage-Gated Channel Alpha 11 polypeptide. Non-limiting examples of SCN11A genes include: NCBI Gene ID: 11280 [human], NCBI Gene ID: 485593 [canine], NCBI Gene ID: 100068480 [equine], NCBI Gene ID: 101085312 [feline], as well as synonymous and non-synonymous sequence variants thereof. Non-limiting examples of gene products encoded by a SCN11A gene include: UniProt: Q9UI33; NP_001336182.1 [human], XP_038426400.1 [canine], XP_001916634.3 [equine], XP_044893782.1 [feline], as well as sequence variants, isoforms encoded by alternative splicing, and various glycoforms thereof. Canonically, the protein encoded by these genes is a membrane-spanning subunit of voltage-dependent sodium channels and is highly expressed in nociceptive neurons of dorsal root ganglia and trigeminal ganglia. Mutations in the SCN11A gene have been associated with various pain disorders. In some instances, and merely for the sake of disambiguation, a prefix is added when referring to the protein or gene of a particular species (with h, c, e, and f referring to the human, canine, equine, and feline forms, respectively).

[0175] The terms “TAC1 gene” refers to a mammalian gene encoding a Tachykinin Precursor 1 polypeptide. Non-limiting examples of TAC1 genes include: NCBI Gene ID: 6863 [human], NCBI Gene ID: 475239 [canine], NCBI Gene ID: 100052324 [equine], NCBI Gene ID: 101095481 [feline], as well as synonymous and non-synonymous sequence variants thereof. Non-limiting examples of gene products encoded by a TAC1 gene include: UniProt: P20366; NP_003173.1 [human], XP_038541905.1 [canine], XP_014594521.1 [equine], XP_003982840.1 [feline], as well as sequence variants, isoforms encoded by alternative splicing, and various glycoforms thereof. Canonically, the protein encoded by these genes is a precursor for four products of the tachykinin peptide hormone family-substance P, neurokinin A, neuropeptide K and neuropeptide gamma. These hormones are thought to function as neurotransmitters that interact with nerve receptors and smooth muscle cells. In some instances, and merely for the sake of disambiguation, a prefix is added when referring to the protein or gene of a particular species (with h, c, e, and f, referring to the human, canine, equine, and feline forms, respectively).

[0176] The terms “TAC3 gene” refers to a mammalian gene encoding a Tachykinin Precursor 3 polypeptide. Non-limiting examples of TAC3 genes include: NCBI Gene ID: 6866 [human], NCBI Gene ID: 607315 [canine], NCBI Gene ID: 100052722 [equine], NCBI Gene ID: 101089368 [feline], as well as synonymous and non-synonymous sequence variants thereof. Non-limiting examples of gene products encoded by a TAC3 gene include: UniProt: Q9UHF0; NP_001171525.1 [human], UniProt: A0A8I3N7Z8; NP_001362511.2 canine], XP_023499603.1 [equine], XP_019690663.1 [feline], as well as sequence variants, isoforms encoded by alternative splicing, and various glycoforms thereof. Canonically, the protein encoded by these genes is proteolytically processed to generate a mature peptide, which is primarily expressed in the central and peripheral nervous systems and functions as a neurotransmitter. This peptide is the ligand for the neurokinin-3 receptor. These hormones are thought to function as neurotransmitters that interact with nerve receptors and smooth muscle cells. In some instances, and merely for the sake of disambiguation, a prefix is added when referring to the protein or gene of a particular species (with h, c, e, and f referring to the human, canine, equine, and feline forms, respectively).

[0177] The term “TACR1 gene” refers to a mammalian gene encoding a Tachykinin Receptor 1 polypeptide. Non-limiting examples of TACR1 genes include: NCBI Gene ID: 6869 [human], NCBI Gene ID: 403815 [canine], NCBI Gene ID: 100053491 [equine], NCBI Gene ID: 101090094 [feline], as well as synonymous and non-synonymous sequence variants thereof. Non-limiting examples of gene products encoded by a TACR1 gene include: UniProt: P25103; NP_001049.1 [human], NP_001012637.1 canine], XP_001499730.1 [equine], XP_003984209.1 [feline], as well as sequence variants, isoforms encoded by alternative splicing, and various glycoforms thereof. Canonically, the protein encoded by these genes is the receptor for the tachykinin substance P, also referred to as neurokinin 1. TACR1 activates a phosphatidylinositol-calcium second messenger system and can also bind substance K and neuromedin-K with less affinity. In some instances, and merely for the sake of disambiguation, a prefix is added when referring to the protein or gene of a particular species (with h, c, e, and f referring to the human, canine, equine, and feline forms, respectively).

[0178] The term “TACR2 gene” refers to a mammalian gene encoding a Tachykinin Receptor 2 polypeptide. Non-limiting examples of TACR2 genes include: NCBI Gene ID: 6865 [human], NCBI Gene ID: 489020 [canine], NCBI Gene ID: 100034168 [equine], NCBI Gene ID: 101094541 [feline]], as well as synonymous and non-synonymous sequence variants thereof. Non-limiting examples of gene products encoded by a TACR2 gene include: UniProt: P21452; NP_001048.2 [human], NP_001012635.1 [canine], XP_001502752.2 [equine], XP_044896003.1 [feline], as well as sequence variants, isoforms encoded by alternative splicing, and various glycoforms thereof. Canonically, the protein encoded by these genes is the receptor for the tachykinin substance K, also referred to as neurokinin A. TACR2 activates a phosphatidylinositol-calcium second messenger system and can also bind neuromedin-K and substance P with less affinity. In some instances, and merely for the sake of disambiguation, a prefix is added when referring to the protein or gene of a particular species (with h, c, e, and f, referring to the human, canine, equine, and feline forms, respectively).

[0179] The term “TACR3 gene” refers to a mammalian gene encoding a Tachykinin Receptor 3 polypeptide. Non-limiting examples of TACR3 genes include: NCBI Gene ID: 6870 [human], NCBI Gene ID: 403814 [canine], NCBI Gene ID: 100073088 [equine], NCBI Gene ID: 101093603 [feline], as well as synonymous and non-synonymous sequence variants thereof. Non-limiting examples of gene products encoded by a TACR3 gene include: UniProt: P29371; NP_001050.1 [human], NP_001091010.1 [canine], XP_023492571.1 [equine], XP_003985169.3 [feline], as well as sequence variants, isoforms encoded by alternative splicing, and various glycoforms thereof. Canonically, the protein encoded by these genes is the receptor for the tachykinin neurokinin 3, also referred to as neurokinin B or neuromedin-K. TACR3 activates a phosphatidylinositol-calcium second messenger system and can also bind substance K and substance P with less affinity. In some instances, and merely for the sake of disambiguation, a prefix is added when referring to the protein or gene of a particular species (with h, c, e, and f referring to the human, canine, equine, and feline forms, respectively).

[0180] The term “MRGPRX2 gene” refers to a mammalian gene encoding a MAS related GPR family member X2 polypeptide. Non-limiting examples of MRGPRX2 genes include: NCBI Gene ID: 117194 [human], NCBI Gene ID: 485410 [canine], NCBI Gene ID: 100071950 [equine], NCBI Gene ID: 101097092 [feline]) or an encoded gene product (e.g., UniProt: Q96LB1; NP_001290544.1 [human], XP_038285538.1 [canine], XP_023501936.1 [equine], XP_003993155.1 [feline], as well as sequence variants, isoforms encoded by alternative splicing, and various glycoforms thereof. Canonically, the protein encoded by these genes enables G protein-coupled receptor activity and neuropeptide binding activity and is involved in mast cell degranulation and positive regulation of cytokinesis. In some instances, and merely for the sake of disambiguation, a prefix is added when referring to the protein or gene of a particular species (with h, c, e, and f referring to the human, canine, equine, and feline forms, respectively).

[0181] The term “ATP1A1 gene” refers to a mammalian gene encoding a ATPase Na+/K+ transporting subunit alpha 1 polypeptide. Non-limiting examples of ATP1A1 genes include: NCBI Gene ID: 476 [human], NCBI Gene ID: 403992 [canine], NCBI Gene ID: 100034139 [equine], NCBI Gene ID: 101083695 [feline], as well as synonymous and non-synonymous sequence variants thereof. Non-limiting examples of gene products encoded by a ATP1A1 gene include: UniProt: P05023; NP_000692.2 [human], NP_001376153.1 [canine], NP_001108004.2 [equine], XP_011283388.1 [feline], as well as sequence variants, isoforms encoded by alternative splicing, and various glycoforms thereof. Canonically, the protein encoded by these genes is an integral membrane protein subunit of the complex responsible for establishing and maintaining the electrochemical gradients of Na and K ions across a plasma membrane, which is essential for osmoregulation and electrical excitability of nerve and muscle. In some instances, and merely for the sake of disambiguation, a prefix is added when referring to the protein or gene of a particular species (with h, c, e, and f, referring to the human, canine, equine, and feline forms, respectively).

[0182] The term “CALCA gene” refers to a mammalian gene encoding a Calcitonin Related Polypeptide Alpha polypeptide. Non-limiting examples of CALCA genes include: NCBI Gene ID: 796 [human], NCBI Gene ID: 403946 [canine], NCBI Gene ID: 100033906 [equine], NCBI Gene ID: 101095582 [feline], as well as synonymous and non-synonymous sequence variants thereof. Non-limiting examples of gene products encoded by a CALCA gene include: UniProt: P01258; NP_001029124.1 [human], NP_001300719.1 [canine], NP_001075323.1 [equine], XP_019667660.1 [feline], as well as sequence variants, isoforms encoded by alternative splicing, and various glycoforms thereof. Canonically, this gene encodes multiple gene products, such as calcitonin, calcitonin gene-related peptide and katacalcin, through tissue-specific alternative RNA splicing of the gene transcripts and cleavage of inactive precursor proteins. The proteins are involved in calcium regulation, regulate phosphorus metabolism, and function as a vasodilator, among other functions. In some instances, and merely for the sake of disambiguation, a prefix is added when referring to the protein or gene of a particular species (with h, c, e, and f referring to the human, canine, equine, and feline forms, respectively).

[0183] The term “CALCB gene” refers to a mammalian gene encoding a Calcitonin Related Polypeptide Beta polypeptide. Non-limiting examples of CALCB genes include: NCBI Gene ID: 797 [human], NCBI Gene ID: 403415 [canine], NCBI Gene ID: 100034126 [equine], NCBI Gene ID: 101094539 [feline], as well as synonymous and non-synonymous sequence variants thereof. Non-limiting examples of gene products encoded by a CALCB gene include: UniProt: P10092; NP_000719.1 [human], NP_001002948.1 [canine], NP_001075397.1 [equine], XP_044894937.1 [feline], as well as sequence variants, isoforms encoded by alternative splicing, and various glycoforms thereof. Canonically, the protein encoded by these genes acts as a vasodilator and a neurotransmitter, among other functions. In some instances, and merely for the sake of disambiguation, a prefix is added when referring to the protein or gene of a particular species (with h, c, e, and f, referring to the human, canine, equine, and feline forms, respectively).

[0184] The terms “CALCRL gene” refers to a mammalian gene encoding a Calcitonin Receptor Like Receptor polypeptide. Non-limiting examples of CALCRL genes include: NCBI Gene ID: 10203 [human], NCBI Gene ID: 488438 [canine], NCBI Gene ID: 100054281 [equine], NCBI Gene ID: 101086333 [feline], as well as synonymous and non-synonymous sequence variants thereof. Non-limiting examples of gene products encoded by a CALCRL gene include: UniProt: Q16602; NP_001258680.1 [human], XP_038303202.1 [canine], XP_023477941.1 [equine], XP_011283721.1 [feline], as well as sequence variants, isoforms encoded by alternative splicing, and various glycoforms thereof. Canonically, the protein encoded by these genes comprises the receptor for CGRP (with RAMP1) and receptor for ADM (with RAMP2/3) and activates adenylyl cyclase. In some instances, and merely for the sake of disambiguation, a prefix is added when referring to the protein or gene of a particular species (with h, c, e, and f, referring to the human, canine, equine, and feline forms, respectively).

[0185] The term “RAMP1 gene” refers to a mammalian gene encoding a Receptor Activity Modifying Protein 1 polypeptide. Non-limiting examples of RAMP1 genes include: NCBI Gene ID: 10267 [human], NCBI Gene ID: 607163 [canine], NCBI Gene ID: 100066550 [equine], NCBI Gene ID: 101092133 [feline], as well as synonymous and non-synonymous sequence variants thereof. Non-limiting examples of gene products encoded by a RAMP1 gene include: UniProt: 060894; NP_005846.1 [human], XP_038291846.1 [canine], XP_023498460.1 [equine], XP_044890618.1 [feline], as well as sequence variants, isoforms encoded by alternative splicing, and various glycoforms thereof. Canonically, the protein encoded by these genes is required to transport calcitonin-receptor-like receptor (CRLR) to the plasma membrane and, with CRLR, functions as a CGRP receptor. In some instances, and merely for the sake of disambiguation, a prefix is added when referring to the protein or gene of a particular species (with h, c, e, and f, referring to the human, canine, equine, and feline forms, respectively).

[0186] The term “ADM gene” refers to a mammalian gene encoding an Adrenomedullin polypeptide. Non-limiting examples of ADM genes include: NCBI Gene ID: 133 [human], NCBI Gene ID: 403817 [canine], NCBI Gene ID: 100033857 [equine], NCBI Gene ID: 101087095 [feline], as well as synonymous and non-synonymous sequence variants thereof. Non-limiting examples of gene products encoded by a ADM gene include: UniProt: P35318; NP_001115.1 [human], NP_001003183.1 [canine], NP_001157351.1 [equine], XP_044894880.1 [feline], as well as sequence variants, isoforms encoded by alternative splicing, and various glycoforms thereof. Canonically, the protein encoded by this gene is a 52 aa peptide with several functions, including vasodilation, regulation of hormone secretion, promotion of angiogenesis. In some instances, and merely for the sake of disambiguation, a prefix is added when referring to the protein or gene of a particular species (with h, c, e, and f referring to the human, canine, equine, and feline forms, respectively).

[0187] The term “CRCP gene” refers to a mammalian gene encoding a CGRP Receptor Component polypeptide. Non-limiting examples of CRCP genes include: NCBI Gene ID: 27297 [human], NCBI Gene ID: 479705 [canine], NCBI Gene ID: 100061681 [equine], NCBI Gene ID: 101084503 [feline], as well as synonymous and non-synonymous sequence variants thereof. Non-limiting examples of gene products encoded by a CRCP gene include: UniProt: 075575; NP_001035737.1 [human], XP_038523718.1 [canine], XP_001493592.3 [equine], XP_044903465.1 [feline], as well as sequence variants, isoforms encoded by alternative splicing, and various glycoforms thereof. Canonically, the protein encoded by this gene is an accessory protein for the CGRP receptor that modulates CGRP responsiveness in a variety of tissues. In some instances, and merely for the sake of disambiguation, a prefix is added when referring to the protein or gene of a particular species (with h, c, e, and f referring to the human, canine, equine, and feline forms, respectively).

[0188] The term “YAP1 gene” refers to a mammalian gene encoding a Yes1-Associated Protein polypeptide. Non-limiting examples of YAP1 genes include: NCBI Gene ID: 10413 [human], NCBI Gene ID: 479465 [canine], NCBI Gene ID: 100068834 [equine], NCBI Gene ID: 101101408 [feline], as well as synonymous and non-synonymous sequence variants thereof. Non-limiting examples of gene products encoded by a YAP1 gene include: UniProt: P46937; NP_001123617.1 [human], XP 038521022.1 [canine], XP_023500466.1 [equine], XP_044894121.1 [feline], as well as sequence variants, isoforms encoded by alternative splicing, and various glycoforms thereof. Canonically, the protein encoded by this gene is involved in development, growth, repair and homeostasis. In some instances, and merely for the sake of disambiguation, a prefix is added when referring to the protein or gene of a particular species (with h, c, e, and f, referring to the human, canine, equine, and feline forms, respectively).

[0189] The term “IL1RAP gene” refers to a mammalian gene encoding an Interleukin 1 Receptor Accessory Protein polypeptide. Non-limiting examples of ILRAP1 genes include: NCBI Gene ID: 3556 [human], NCBI Gene ID: 488126 [canine], NCBI Gene ID: 100068726 [equine], NCBI Gene ID: 101094125 [feline], as well as synonymous and non-synonymous sequence variants thereof. Non-limiting examples of gene products encoded by a IL1RAP gene include: UniProt: Q9NPH3; NP_002173.1 [human], XP_038318680.1 [canine], XP_001498597.2 [equine], XP 044893081.1 [feline], as well as sequence variants, isoforms encoded by alternative splicing, and various glycoforms thereof. Canonically, the proteins encoded by the genes listed above are capable of associating with IL1R1 bound to IL1 to form the high affinity interleukin-1 receptor complex that mediates interleukin-1-dependent activation of NF-kappa-B and other signaling pathways through the recruitment of adapter molecules such as TOLL1P, MYD88, and IRAK1 or IRAK2 via TIR-TIR interactions with the cytoplasmic domains of receptor/coreceptor subunits. In some instances, and merely for the sake of disambiguation, a prefix is added when referring to the protein or gene of a particular species (with h, c, e, and f, referring to the human, canine, equine, and feline forms, respectively).

[0190] The term “IL1R1 gene” refers to a mammalian gene encoding an Interleukin 1 receptor type 1 polypeptide. Non-limiting examples of IL1R1 genes include: NCBI Gene ID: 3554 [human], NCBI Gene ID: 481328 [canine], NCBI Gene ID: 100009699 [equine], NCBI Gene ID: 101080705 [feline], as well as synonymous and non-synonymous sequence variants thereof. Non-limiting examples of gene products encoded by a ILR1 gene include: UniProt: P14778; NP_001307909.1 [human], XP 038536135.1 [canine], NP_001075263.2 [equine], XP_023107327.2 [feline], as well as sequence variants, isoforms encoded by alternative splicing, and various glycoforms thereof. Canonically, the proteins encoded by the genes listed above are capable of binding all forms of the pro-inflammatory cytokine interleukin 1 (IL1 or IL1) to mediate interleukin-1-dependent activation of NF-kappa-B, MAPK and other signaling pathways. This intracellular signaling involves the recruitment of adapter molecules such as TOLLIP, MYD88, and IRAK1 or IRAK2 via TIR-TIR interactions with the cytoplasmic domains of receptor/coreceptor subunits. IL1R1 can also bind the Interleukin 1 receptor antagonist (IL1Ra or IL1Ra or IL1RN), which prevents association with IL1RAP to form a signaling-competent complex. In some instances, and merely for the sake of disambiguation, a prefix is added when referring to the protein or gene of a particular species (with h, c, e, and f referring to the human, canine, equine, and feline forms, respectively).

[0191] The term “ILIA gene” refers to a mammalian gene encoding a Interleukin 1 Alpha polypeptide. Non-limiting examples of IL1A genes include: NCBI Gene ID: 3552 [human], NCBI Gene ID: 403782 [canine], NCBI Gene ID: 100064969 [equine], NCBI Gene ID: 493944 [feline], as well as synonymous and non-synonymous sequence variants thereof. Non-limiting examples of gene products encoded by a IL1A gene include: UniProt: P01583; NP_000566.3 [human], NP_001003157.2 [canine], NP_001075969.2 [equine], NP_001009351.1 [feline], as well as sequence variants, isoforms encoded by alternative splicing, and various glycoforms thereof. Canonically, the proteins encoded by the genes listed above are pro-inflammatory cytokines that signal through interaction with IL1R1 and IL1RAP to activate various pathways, including MAPK, JNK and NF-kappa B. In some instances, and merely for the sake of disambiguation, a prefix is added when referring to the protein or gene of a particular species (with h, c, e, and f referring to the human, canine, equine, and feline forms, respectively).

[0192] The terms “IL1B gene” refers to a mammalian gene encoding an Interleukin 1 Beta polypeptide. Non-limiting examples of IL1B genes include: NCBI Gene ID: 3553 [human], NCBI Gene ID: 403974 [canine], NCBI Gene ID: 100034237 [equine], NCBI Gene ID: 768274 [feline], as well as synonymous and non-synonymous sequence variants thereof. Non-limiting examples of gene products encoded by an IL1B gene include: UniProt: P01584; NP_000567.1 [human], NP_001033060.1 [canine], NP_001075995.1 [equine], NP_001070882.1 [feline], as well as sequence variants, isoforms encoded by alternative splicing, and various glycoforms thereof. Canonically, the protein encoded by the genes listed above is a major mediator of the inflammatory response and pyrogen that signals through interaction with IL1R1 and IL1RAP. In the central nervous system (CNS) IL1B has been shown to contribute to inflammatory pain hypersensitivity, among other pathologies. In some instances, and merely for the sake of disambiguation, a prefix is added when referring to the protein or gene of a particular species (with h, c, e, and f referring to the human, canine, equine, and feline forms, respectively).

[0193] The term “treatment” refers to obtaining a desired pharmacologic and/or physiologic effect. The effect may be prophylactic in terms of completely or partially preventing a disease or symptom thereof and/or may be therapeutic in terms of a partial or complete cure for a disease and/or adverse effect attributable to the disease. For example, a composition, method, or system of the present disclosure may be administered as a prophylactic treatment to a subject that has a predisposition for a given condition (e.g., arthritis). “Treatment”, as used herein, covers any treatment of a disease in a mammal, particularly in a human, canine, feline, or equine, and includes: (a) preventing the disease from occurring in a subject which may be predisposed to the disease but has not yet been diagnosed as having it; (b) inhibiting the disease, i.e., arresting its development or progression; and (c) relieving the disease, i.e., causing regression of the disease and/or relieving one or more disease symptoms.

[0194] “Treatment” is also meant to encompass delivery of an agent in order to provide for a pharmacologic effect, even in the absence of a disease or condition. For example, “treatment” encompasses delivery of a composition that can elicit an immune response or confer immunity in the absence of a disease condition, e.g., in the case of a vaccine. It is understood that compositions and methods of the present disclosure are applicable to treat all mammals, including, but not limited to human, canine, feline, equine, and bovine subjects.

[0195] The term “therapeutically effective” refers to the amount of a composition or combination of compositions as described herein that is sufficient to effect the intended application including, but not limited to, disease treatment. A therapeutically effective amount may vary depending upon the intended application (in vitro or in vivo), or the subject and disease condition being treated (e.g., the weight, age and gender of the subject), the severity of the disease condition, or the manner of administration. The term also applies to a dose that will induce a particular response in target cells (e.g., the reduction of platelet adhesion and/or cell migration). The specific dose will vary depending on the particular composition(s) chosen, the dosing regimen to be followed, whether the composition is administered in combination with other compositions or compounds, timing of administration, the tissue to which it is administered, and the physical delivery system in which the composition is carried.

[0196] A “spinal condition or disorder” includes, but is not limited to, low back pain, neck pain, discogenic disorders, adolescent idiopathic scoliosis, adult degenerative scoliosis, cervical degenerative disc disease, cervical disc herniation, cervical myelopathy, cervical stenosis, compression fractures, degenerative spondylolisthesis, isthmic spondylolisthesis, low back sprains and strains, lumbar degenerative disc disease, lumbar disc hemiation, lumbar stenosis, neck sprain (whiplash) and strain, neck strain, osteoporosis, and whiplash. Generally, such disorders or conditions contribute to or cause localized nociception, inflammation, or morphological changes (e.g., fibrosis, degeneration, osteolysis, osteogenesis) at the cervical, thoracic, lumbar or sacral spine, or surrounding tissues.

[0197] “Low back pain” is defined as measurable or discernible pain or discomfort (either chronic or sporadic) in a given subject, encompassing at least the lumbar-spinal region of a mammal. The pain may present as being localized to the lower back (e.g., muscle ache) or as shooting, burning, stinging, and/or radiating sensations throughout the subject's back and/or extremities. The pain may be idiopathic or may be associated with one or more (diagnosed or undiagnosed) underlying conditions including, but not limited to degenerative disc disease, chronic inflammation, arthritis, osteoporosis, trauma (e.g., post-surgical), infection (e.g., discospondylitis), neuropathies, musculo-skeletal abnormalities (e.g., slipped discs or spinal stenosis or spondylolisthesis), herniated nucleus pulposus (HNP), annular ligament tears, facet joint arthritis, radicular nerve compression, and/or other degenerative disorders.

[0198] “Neck pain” is defined as measurable or discernable pain or discomfort associated with the cervical spine or adjacent ligaments, muscles, and/or tendons. The pain may manifest as localized pain in the neck or shooting, stinging, burning, and/or radiating sensations throughout the back or extremities, including, but not limited to, the subject's head, shoulders, arms, legs, and/or back. Neck pain may be idiopathic or associated with one or more (diagnosed or undiagnosed) underlying conditions, including, but not limited to, degenerative disc disease, rheumatoid arthritis, osteoporosis, fibromyalgia, chronic inflammation, infection (e.g., discospondylitis), herniated disc, spondylosis, spinal stenosis, cervical compressive myelopathy, whiplash, and/or other disorders.

[0199] The terms “polynucleotide,” “nucleotide,” and “nucleic acid” are used interchangeably herein to refer to all forms of nucleic acid, oligonucleotides, including deoxyribonucleic acid (DNA) and ribonucleic acid (RNA). Polynucleotides include genomic DNA, cDNA and antisense DNA, and spliced or unspliced mRNA, rRNA, tRNA, lncRNA, RNA antagomirs, and inhibitory DNA or RNA (RNAi, e.g., small or short hairpin (sh)RNA, microRNA (miRNA), aptamers, small or short interfering (si)RNA, trans-splicing RNA, or antisense RNA). Polynucleotides also include non-coding RNA, which include for example, but are not limited to, RNAi, miRNAs, lncRNAs, RNA antagomirs, aptamers, and any other non-coding RNAs known to those of skill in the art. Polynucleotides include naturally occurring, synthetic, and intentionally altered or modified polynucleotides as well as analogues and derivatives. The term “polynucleotide” also refers to a polymeric form of nucleotides of any length, including deoxyribonucleotides or ribonucleotides, or analogs thereof, and is synonymous with nucleic acid sequence. A polynucleotide may comprise modified nucleotides, such as methylated nucleotides and nucleotide analogs, and may be interrupted by non-nucleotide components. If present, modifications to the nucleotide structure may be imparted before or after assembly of the polymer. The term polynucleotide, as used herein, refers interchangeably to double- and single-stranded molecules. Unless otherwise specified or required, any embodiment as described herein encompassing a polynucleotide encompasses both the double-stranded form and each of two complementary single-stranded forms known or predicted to make up the double-stranded form. Polynucleotides can be single, double, or triplex, linear or circular, and can be of any length. In discussing polynucleotides, a sequence or structure of a particular polynucleotide may be described herein according to the convention of providing the sequence in the 5′ to 3′ direction.

[0200] The term “gene” or “nucleotide sequence encoding a polypeptide” refers to the segment of DNA involved in producing a polypeptide chain. The DNA segment may include regions preceding and following the coding region (leader and trailer) involved in the transcription/translation of the gene product and the regulation of the transcription/translation, as well as intervening sequences (introns) between individual coding segments (exons). For example, a gene includes a polynucleotide containing at least one open reading frame capable of encoding a particular protein or polypeptide after being transcribed and translated.

[0201] The terms “extracellular domain” and “ectodomain” may be used interchangeably and, when referring to transmembrane cellular receptors, is defined as the portion of the protein that is exposed to the extracellular environment and is able to engage with and/or bind a ligand.

[0202] The terms “cytoplasmic domain” and “intracellular domain” may be used interchangeably and, when referring to transmembrane receptors, define the portion of the protein that is exposed to the cytoplasm. In many instances, these portions of the proteins comprise signaling domains to recruit and associate with various intracellular factors. Following engagement with a ligand via the extracellular domain, the interaction effects changes that may result in new association, dissociation or recruitment of various cytoplasmic factors that aid in transducing a signal.

[0203] The term “transmembrane domain,” which may be abbreviated as “TM,” as it refers to transmembrane receptors, is defined as the portion of the protein is embedded within the plasma membrane (i.e., not exposed to either the extracellular environment or the cytosol). Transmembrane domains are generally of a more hydrophobic character than either the extracellular or cytoplasmic portions and often adopt higher order helical structures. Though its primary role is an anchor, ligand-induced conformational changes to particular receptors have been shown to impact the transmembrane domain such that it is integral to the subsequent intracellular signaling.

[0204] The term “receptor” refers to a protein capable of binding another cognate protein (i.e., its ligand) with high affinity. This receptor-ligand interaction may be 1:1, or result in multimerization, wherein numerous proteins aggregate to bind one or more ligands. Receptors are generally present at the cell surface, such that they may most efficiently encounter a ligand and initiate intracellular signaling.

[0205] The term “intracellular signaling” refers to cellular changes that result due to events occurring at the cell surface. Typically, a soluble ligand binds its receptor at the cell surface, which can induce changes in the receptor, such that associated intracellular factors are also affected. These factors may then impact others within the cell, and this cascade continues until, in many cases, a particular factor is able to alter gene expression in the nucleus in response to the stimulus at the surface.

[0206] The term “RNA-guided nuclease” refers to an enzyme capable of breaking the backbone of, for example, a DNA molecule. The activity of RNA-guided nucleases is directed by a nucleic acid molecule (i.e., guide RNA). Once properly oriented to form a functional ribonucleoprotein complex, the enzyme locates a specific position within a target nucleic acid (e.g., a gene or locus) via sequence complementarity with a portion of the guide RNA. Non-exhaustive examples of RNA-guided nucleases include Cas9, Cas12 and Cas12a (previously known as Cpf1).

[0207] The term “Cas9” refers to an RNA-guided, double-stranded DNA-binding nuclease protein or nickase protein, or a variant thereof and may be used to refer to either naturally-occurring or recombinant Cas9 nucleases variants (e.g., ES-Cas9, HF-Cas9, PE-Cas9, and AR-Cas9). The wildtype Cas9 nuclease has two functional domains, e.g., RuvC and HNH, that simultaneously cut both strands of double stranded DNA, resulting in a double-strand break. Cas9 enzymes described herein may comprise a HNH or HNH-like nuclease domain and/or a RuvC or RuvC-like nuclease domain without impacts on the ability to induce double-strand breaks in genomic DNA (e.g., at a target locus) when both functional domains are active. The Cas9 enzyme may comprise one or more catalytic domains of a Cas9 protein derived from bacteria belonging to the group consisting of Corynebacter, Sutterella, Legionella, Treponema, Filifactor, Eubacterium, Streptococcus, Lactobacillus, Mycoplasma, Bacteroides, Flaviivola, Flavobacterium, Sphaerochaeta, Azospirillum, Gluconacetobacter, Neisseria, Roseburia, Parvibaculum, Staphylococcus, Nitratifractor, and Campylobacter. In some embodiments, the two catalytic domains are derived from different bacteria species.

[0208] As used herein, “PAM” refers to a Protospacer Adjacent Motif and is necessary for an RNA-guided nuclease to bind a target nucleic acid. In many instances, the PAM directly abuts the complementary sequence in the target. Naturally occurring Cas9, for example, molecules recognize specific PAM sequences (see, e.g., Table 1). In some embodiments, a Cas9 molecule has the same PAM specificities as a naturally occurring Cas9 molecule. In other embodiments, a Cas9 molecule has a PAM specificity not associated with a naturally occurring Cas9 molecule. In other embodiments, a Cas9 molecule's PAM specificity is not associated with the naturally occurring Cas9 molecule to which it has the closest sequence homology. For example, a naturally occurring Cas9 molecule can be altered such that the PAM sequence recognition is altered to decrease off target sites, improve specificity, or eliminate a PAM recognition requirement. In an embodiment, a Cas9 molecule may be altered (e.g., to lengthen a PAM recognition sequence, improve Cas9 specificity to high level of identity, to decrease off target sites, and/or increase specificity). In an embodiment, the length of the PAM recognition sequence is at least 4, 5, 6, 7, 8, 9, 10 or 15 amino acids in length. In some embodiments, a Cas9 molecule may be altered to ablate PAM recognition.

[0209] The terms “guide RNA,” “gRNA” or “sgRNA” may be used interchangeably and refer to an RNA molecule, preferably a synthetic RNA molecule, composed of a targeting (crRNA) sequence and scaffold. These molecules, once loaded onto a functional RNA-guided nuclease can direct sequence-specific cleavage of a target nucleic acid.

[0210] An sgRNA can be administered or formulated, e.g., as a synthetic RNA, or as a nucleic acid comprising a sequence encoding the gRNA, which is then expressed in the target cells. As would be evident to one of ordinary skill in the art, various tools may be used in the design and/or optimization of an sgRNA in order to, for example, increase specificity and/or precision of genomic editing at a particular site.

[0211] In general, candidate sgRNAs may be designed and identified by first locating suitable PAMs within a genomic sequence. Then additional calculations may be utilized to predict on-target and off-target efficiencies. Available web-based tools to aid in the initial design and modeling of candidate sgRNAs include, without limitation, CRISPRseek, CRISPR Design Tool, Cas-OFFinder, E-CRISP, ChopChop, CasOT, CRISPR direct, CRISPOR, BREAKING-CAS, CrispRGold, and CCTop. See, e.g., Safari, F. et al. (2017). Current Pharmaceutical Biotechnology, 18(13):1038-54, which is incorporated by reference herein in its entirety for all purposes. Such tools are also described, for example, in PCT Publication No. WO2014093701A1 and Liu, G. et al. (2020). Computational approaches for effective CRISPR guide RNA design and evaluation. Computational and Structural Biotechnology Journal, 18: 35-44, each of which is incorporated by reference herein in its entirety for all purposes. Candidate sgRNAs may be further assessed by experimental screening or other methodologies.

[0212] The terms “CRISPR RNA” or “crRNA” refer to the portion of an sgRNA molecule with complementarity to the target nucleic acid.

[0213] The phrase “pharmaceutically acceptable” refers to those compounds, materials, compositions, and/or dosage forms that are, within the scope of sound medical judgment, suitable for use in contact with the tissues of human beings and animals without excessive toxicity, irritation, allergic response, or other problems or complications commensurate with a reasonable benefit/risk ratio.

[0214] The terms “pharmaceutically acceptable carrier” or “pharmaceutically acceptable excipient” are intended to include any and all solvents, dispersion media, coatings, antibacterial and antifungal agents, isotonic and absorption delaying agents, and inert ingredients. The use of such pharmaceutically acceptable carriers or pharmaceutically acceptable excipients for active pharmaceutical ingredients is well known in the art. Except insofar as any conventional pharmaceutically acceptable carrier or pharmaceutically acceptable excipient is incompatible with the active pharmaceutical ingredient, its use in the therapeutic compositions of the disclosure is contemplated. Additional active pharmaceutical ingredients, such as other drugs, can also be incorporated into the described compositions and methods.

[0215] The term “pharmaceutically acceptable excipient” is intended to include vehicles and carriers capable of being co-administered with a compound to facilitate the performance of its intended function. The use of such media for pharmaceutically active substances is well known in the art. Examples of such vehicles and carriers include solutions, solvents, dispersion media, delay agents, emulsions and the like. Any other conventional carrier suitable for use with the multi-binding compounds also falls within the scope of the present disclosure.

[0216] As used herein, the term “a”, “an”, or “the” generally is construed to cover both the singular and the plural forms.

[0217] The terms “about” and “approximately” mean within a statistically meaningful range of a value. Such a range can be within an order of magnitude, preferably within 50%, more preferably within 20%, more preferably still within 10%, and even more preferably within 5% of a given value or range. The allowable variation encompassed by the terms “about” or “approximately” depends on the particular system under study, and can be readily appreciated by one of ordinary skill in the art. Moreover, as used herein, the terms “about” and “approximately” mean that compositions, amounts, formulations, parameters, shapes and other quantities and characteristics are not and need not be exact, but may be approximate and/or larger or smaller, as desired, reflecting tolerances, conversion factors, rounding off, measurement error and the like, and other factors known to those of skill in the art. In general, a dimension, size, formulation, parameter, shape or other quantity or characteristic is “about” or “approximate,” whether or not expressly stated to be such. It is noted that embodiments of very different sizes, shapes and dimensions may employ the described arrangements.

[0218] The term “substantially” as used herein can refer to a majority of, or mostly, as in at least about 50%, 60%, 70%, 80%, 90%, 95%, 96%, 97%, 98%, 99%, 99.5%, 99.9%, 99.99%, or at least about 99.999% or more.

[0219] The transitional terms “comprising,” “consisting essentially of,” and “consisting of,” when used in the appended claims, in original and amended form, define the claim scope with respect to what unrecited additional claim elements or steps, if any, are excluded from the scope of the claim(s). The term “comprising” is intended to be inclusive or open-ended and does not exclude any additional, unrecited element, method, step or material. The term “consisting of” excludes any element, step or material other than those specified in the claim and, in the latter instance, impurities ordinary associated with the specified material(s). The term “consisting essentially of” limits the scope of a claim to the specified elements, steps or material(s) and those that do not materially affect the basic and novel characteristic(s) of the claimed methods and compositions. All compositions, methods, and kits described herein that embody the present disclosure can, in alternate embodiments, be more specifically defined by any of the transitional terms “comprising,” “consisting essentially of,” and “consisting of.”

[0220] As used herein, the term “delivering” means providing an entity to a destination. For example, delivering a therapeutic and/or prophylactic to a subject may involve administering a nanoparticle composition including the therapeutic and/or prophylactic to the subject (e.g., by an intravenous, intramuscular, intradermal, subcutaneous, intraarticular, or intradiscal route). Administration of a nanoparticle composition to a mammal or mammalian cell may involve contacting one or more cells with the nanoparticle composition.

[0221] As used herein, “naturally occurring” means existing in nature without artificial aid.

[0222] As used herein, a “PEG lipid” or “PEGylated lipid” refers to a lipid comprising a polyethylene glycol component. These lipids may also be referred to a PEG-modified lipids.

[0223] As used herein, a “phospholipid” is a lipid that includes a phosphate moiety and one or more carbon chains, such as unsaturated fatty acid chains. A phospholipid may include one or more multiple (e.g., double or triple) bonds (e.g., one or more unsaturations). Particular phospholipids may facilitate fusion to a membrane. For example, a cationic phospholipid may interact with one or more negatively charged phospholipids of a membrane (e.g., a cellular or intracellular membrane). Fusion of a phospholipid to a membrane may allow one or more elements of a lipid-containing composition to pass through the membrane permitting, e.g., delivery of the one or more elements to a cell.

[0224] Any of the compositions disclosed herein can be administered to a non-human subject, such as a laboratory or farm animal. Non-limiting examples of a non-human subject include laboratory or research animals, pets, wild or domestic animals, farm animals, etc., e.g., a dog, a goat, a guinea pig, a hamster, a mouse, a pig, a non-human primate (e.g., a gorilla, an ape, an orangutan, a lemur, a baboon, etc.), a rat, a sheep, a horse, a cow, or the like. As used herein, a “lipid component” is that component of a nanoparticle composition that includes one or more lipids. For example, the lipid component may include one or more cationic/ionizable, PEGylated, structural, or other lipids, such as phospholipids.

### III. Methods

### A. CRISPR

[0225] Unless otherwise defined, all technical and scientific terms used herein have the same meaning as commonly understood by one of ordinary skill in the art to which this disclosure belongs. Although methods and materials similar or equivalent to those described herein may be used in the practice or testing of the present disclosure, suitable methods and materials are described below. All publications, patent applications, patents, and other references mentioned herein are incorporated by reference in their entirety. In addition, the materials, methods, and examples are illustrative only and not intended to be limiting.

[0226] In one aspect, the present disclosure encompasses compositions relating to clustered regularly interspaced short palindromic repeats (CRISPR) and CRISPR-associated RNA-guided nucleases and associated methods, components, and compositions (hereafter, CRISPR/Cas systems). Such systems minimally require at least one isolated or non-naturally occurring RNA-guided nuclease (e.g., a Cas9 protein) and at least one isolated or non-naturally occurring guide RNA (e.g., an sgRNA) to effectuate augmentation of a nucleic acid sequence (e.g., genomic DNA).

[0227] In some embodiments, a CRISPR/Cas system effectuates the alteration of a targeted gene or locus in a eukaryotic cell by effecting an alteration of the sequence at a target position (e.g., by creating an insertion or deletion (collectively, an indel) resulting in loss-of-function of (i.e., knocking out) the affected gene or allele; e.g., a nucleotide substitution resulting in a truncation, nonsense mutation, or other type of loss-of-function of an encoded product of, for example, (i) one or more growth factors or growth factor receptors (e.g., FGF2, CCN2, NGF, NTF3, NTF4, BDNF, FGFR1, NGFR, NTRK1, NTRK2), (ii) one or more metallproteases or regulators thereof (e.g., ADAM17, ADAMTS1, ADAMTS5, MMP1, MMP2, MMP3, MMP7, MMP8, MMP10, MMP12, MMP13, TIMP1, TIMP3), (iii) one or more cytokines, chemokines or cytokine/chemokine receptors (e.g., CXCL1, CXCL2, CXCL3, CXCL5, CXCL6, CXCL8, CCL2, CCL3, CCL5, CCL7, CCL20, IL1A, IL1B, IL4, IL6, IL10, IL13, IL17A, IL18, TNF, CXCR1, CXCR2, CCR7, TNFRSF1A, TNFRSF1B, IL1R1, IL1RAP, IL4R, IL6R, IL10RA, IL10RB, IL13RA1, IL13RA2, IL17RA, IL18R1, IL18RAP), (iv) one or more regulators of neuronal signaling (e.g., SCN1A, SCN2A, SCN3A, SCN4A, SCN5A, SCN8A, SCN9A, SCN10A, SCN11A, TAC1, TAC3, TACR1, TACR2, TACR3, ATP1A1), (v) one or more other regulators of cell signaling (e.g., CALCA, CALCB, CALCRL, RAMP1, ADM, CRCP, YAP1, MRGPRX2), and (vi) combinations of any genes of (i)-(v), i.e., mRNA or protein; a deletion of one or more nucleotides resulting in a truncation, nonsense mutation, or other type of loss-of-function of an encoded product of, for example, one or more FGF2, CCN2, ADAMTS5, MMP1, or NGF gene; e.g., loss-of-function of the encoded mRNA or protein by a single nucleotide, double nucleotide, or other frame-shifting deletion, or a deletion resulting in a premature stop codon; or an insertion resulting in a truncation, nonsense mutation, or other type of loss-of-function of an encoded gene product, such as an encoded gene product of, for example, one or FGF2, CCN2, ADAMTS5, MMP1, or NGF gene (i.e., mRNA or protein); e.g., a single nucleotide, double nucleotide, or other frame-shifting insertions, or an insertion resulting in a premature stop codon. In some embodiments, a CRISPR/Cas system of the present disclosure provides for the alteration of a gene and/or encoded product of a gene, such that the altered product has a resultant loss-of-function and becomes a dominant negative or decoy (e.g., a transmembrane receptor incapable of initiating intracellular signaling or a soluble receptor). In some embodiments, a CRISPR/Cas system of the present disclosure is encapsulated in an LNP system described herein, e.g., and without limitation, any one of LNP systems LNP001 to LNP240.

[0228] In one aspect, CRISPR/Cas systems effectuate changes to the sequence of a nucleic acid through nuclease activity. For example, in the case of genomic DNA, the RNA-guided-nuclease locates a target position within a targeted gene or locus by sequence complementarity with the target genomic sequence (e.g., CRISPR RNA (crRNA) or a complementary component of a synthetic single guide RNA (sgRNA)) and cleaves the genomic DNA upon recognition of a particular, nuclease-specific motif called the protospacer adjacent motif (PAM). See generally, Collias, D., & Beisel, C. L. (2021). Nature Communications, 12(1), 1-12.

[0229] Nuclease activity (i.e., cleavage) induces a double-strand break (DSB) in the case of genomic DNA. Endogenous cellular mechanisms of DSB repair, namely non-homologous end joining (NHEJ), microhomology-mediated end joining (MMEJ), and homologous recombination, result in erroneous repair at a given target position with some calculable frequency as a result of interference from said components of the CRISPR/Cas system, thereby introducing substitutions or indels into the genomic DNA. See generally Scully, R., et al. (2019). Nature Reviews Molecular Cell Biology, 20(11), 698-714. At some frequency, these indels and/or substitutions may result in frameshifts, nonsense mutations (i.e., early stop codons) or truncations that impact the availability of gene products, such as mRNA and/or protein. In certain embodiments, the CRISPR/Cas system may induce a homology-directed repair (HDR) mechanism leading to insertions of non-random sequences at a target position through the use of templates (e.g., an HDR template) provided to the cell as part of the system along with the nuclease and gRNA. See Bloh, K., & Rivera-Torres, N. (2021). International Journal of Molecular Sciences, 22(8), 3834.

[0230] In general, the minimum requirements of the CRISPR/Cas system will be dependent upon the nuclease (i.e., Cas protein) provided therewith. To this extent, these bacterially derived nucleases have been functionally divided into Types I, III, and V, which all fall into Class 1 and Types II, IV, and VI that are grouped into Class 2.

### Class 1 CRISPR/Cas Systems:

[0231] The exact components, compositions, and methods for effectuating a change in a targeted nucleic acid sequence using a Class 1 CRISPR/Cas system will vary, but should minimally include: a nuclease (selected from at least Types I, and III), at least one guide RNA selected from 1) sgRNA or 2) a combination of crRNA and tracrRNA. These CRISPR/Cas systems have been categorized together as Class 1 CRISPR/Cas systems due to their similarities in requirements and mode of action within a eukaryotic cell. To this end, compositions, components, and methods among Class 1 constituents may be considered functionally interchangeable, and the following details, provided merely for exemplary purposes, do not represent an exhaustive list of class members. In some embodiments, a CRISPR/Cas system of the present disclosure is encapsulated in an LNP system described herein, e.g., and without limitation, any one of LNP systems LNP001 to LNP240.

[0232] Cas3 (see Table 1) is the prototypical Type I DNA nuclease that functions as the effector protein as part of a larger complex (the Cascade complex comprising Cse1, Cse2,), that is capable of genome editing. See generally He, L., et al. (2020). Genes, 11(2), 208. Unlike other CRISPR/Cas systems, Type I systems localize to the DNA target without the Cas3 nuclease via the Cascade complex, which then recruits Cas3 to cleave DNA upon binding and locating the 3′ PAM. The Cascade complex is also responsible for processing crRNAs such that they can be used to guide it to the target position. Because of this functionality, Cascade has the ability to process multiple arrayed crRNAs from a single molecule. See. Luo, M. (2015). Nucleic Acids Research, 43(1), 674-681. As such, Type I system may be used to edit multiple targeted genes or loci from a single molecule.

[0233] Because the natural Cas3 substrate is ssDNA, its function in genomic editing is thought to be as a nickase; however, when targeted in tandem, the resulting edit is a result of blunt end cuts to opposing strands to approximate a blunt-cutting endonuclease, such as Cas9. See Pickar-Oliver, A., & Gersbach, C. A. (2019). Nature Reviews Molecular Cell Biology, 20(8), 490-507.

[0234] Like Type I nucleases, the Type III system relies upon a complex of proteins to effect nucleic acid cleavage. Particularly, Cas10 possesses the nuclease activity to cleave ssDNA in prokaryotes. See Tamulaitis, G. Trends in Microbiology, 25(1), 49-61 (2017). Interestingly, this CRISPR/Cas system, native to archaea, exhibits dual specificity and targets both ssDNA and ssRNA. Aside from this change, the system functions much like Type I in that the crRNA targets an effector complex (similar to Cascade) in a sequence-dependent manner. Similarly, the effector complex processes crRNAs prior to association. The dual nature of this nuclease makes its applications to genomic editing potentially more powerful, as both genomic DNA and, in some cases, mRNAs with the same sequence may be targeted to silence particular targeted genes.

### Class 2 CRISPR/Cas Systems:

[0235] The exact components, compositions, and methods for effectuating a change in a targeted nucleic acid sequence using a Class 2 CRISPR/Cas system will vary but should minimally include: a nuclease (selected from at least Types II, and V), at least one guide RNA selected from 1) sgRNA or 2) a combination of crRNA and tracrRNA. These CRISPR/Cas systems have been categorized together as Class 2 CRISPR/Cas systems due to their similarities in requirements and mode of action within a eukaryotic cell. To this end, compositions, components, and methods among Class 2 constituents may be considered functionally interchangeable, and the following details, provided merely for exemplary purposes, do not represent an exhaustive list of class members:

[0236] Type II nucleases are the best-characterized CRISPR/Cas systems, particularly the canonical genomic editing nuclease Cas9 (see Table 1). Multiple Cas9 proteins, derived from various bacterial species, have been isolated. The primary distinction between these nucleases is the PAM, a required recognition site within the targeted dsDNA. After association with a gRNA molecule, the crRNA (or targeting domain of a sgRNA) orients the nuclease at the proper position, but the protein's recognition of the PAM is what induces a cleavage event near that site, resulting in a blunt DSB.

[0237] In addition to the naturally derived Cas9 proteins, several engineered variants have similarly been reported. These range from Cas9 with enhanced specific (i.e., less off-target activity), such as espCas9. Others have been catalytically modified via point mutations in the RuvC (e.g., D10A) and HNH (e.g., H840A) domains such that they induce only single-strand breaks (i.e., Cas9 nickases). See Frock, R. et al. (2015). Nature Biotechnology, 33(2), 179-186. These have also been shown to be less error-prone in editing. Such mitigation of off-target effects becomes paramount when selecting for a desired insertion (i.e., a knock in mutation, in which a desired nucleotide sequence is introduced into a target nucleic acid molecule) rather than a deletion. Indeed, less off-target effects may aid in the preferred DNA repair mechanism (HDR, in most instances for knock in mutations). See generally Naeem, M., et al. (2020). Cells, 9(7), 1608.

[0238] Additional exemplary further engineered variants of canonical Cas proteins (e.g., mutants, chimeras, and include the following (each of which are hereby incorporated by reference in their entireties for all purposes): WO2015035162A2, WO2019126716A1, WO2019126774A1, WO2014093694A1, WO2014150624A1, US20190225955A1, U.S. patent Ser. No. 11/427,818, U.S. patent Ser. No. 11/242,542, U.S. patent Ser. No. 11/098,297, U.S. patent Ser. No. 10/876,100, U.S. patent Ser. No. 10/767,193, U.S. patent Ser. No. 10/494,621, and U.S. patent Ser. No. 10/100,291.

[0239] For the avoidance of doubt, SpCas9 collectively refers to any one of the group consisting of espCas9 (also referred to herein as ES-Cas9 or esCas9), HF-Cas9, PE-Cas9, ARCas9 (also referred to as AR-Cas9), SpCas9-D1135E, SpCas9-HF1, HypaCas9, HiFiCas9, xCas9-3.6, xCas9-3.7, Sniper-Cas9, evoCas9, SpartaCas, LZ3Cas9, miCas9, and SuperFi-Cas9. Additional examples of Cas9 variants disclosed in the following are hereby incorporated by reference in their entireties for all purposes: Huang, X., et al. (2022). Cells, 11(14), 2186.

[0240] Like the canonical Cas9 systems, Type V nucleases only require a synthetic sgRNA with a targeting domain complementary to a genomic sequence to carry out genomic editing. These nucleases contain a RuvC domain but lack the HNH domain of Type II nucleases. Further, Cas12, for example, leaves a staggered cut in the dsDNA substrate distal to the PAM, as compared to Cas9's blunt cut next to the PAM. Both Cas12a, also known as Cpf1, and Cas12b, also known as C2cl (see Table 1), act as part of larger complex of two gRNA-associated nucleases that acts on dsDNA as a quaternary structure, nicking each strand simultaneously. See Zetsche, B. et al. (2015). Cell, 163(3):759-771; see also Liu, L. et al. (2017). Molecular Cell, 65(2):310-322. Additionally, Cas12b (C2cl) is a highly accurate nuclease with little tolerance for mismatches. See Yang, H. et al. (2016). Cell, 167(7):1814-1828.e12.

TABLE 1
Exemplary list of Cas nucleases and their requirements

| | | | Spacer |
|---|---|---|---|
| | PAM | Type of end generated | length |
| Nuclease (Species) | (5′→3′) | (nucleic acid target) | (nt) |
| Cas9 (S. pyogenes) | NGG | Blunt (dsDNA) | 20 |
| Cas9 (S. aureus) | NNGRRT | Blunt (dsDNA) | 20 |
| Cas9 (C. jejuni) | NNNNRYAC | Blunt (dsDNA) | 22 |
| Cas9 (S. thermophilus) | NNAGAAW | Blunt (dsDNA) | 20 |
| Cas9 (N. meningitidis) | NNNNGATT | Blunt (dsDNA) | 24 |
| Cas9 (F. novicida) | NGG | Blunt (dsDNA) | 21 |
| Cas12a (L. bacterium) | TTTV | 5′ staggered | 23-25 |
| | | (dsDNA/ssDNA) | |
| Cas12a (Acidaminococcus | TTTN | 5′ staggered | 24 |
| sp.) | | (dsDNA/ssDNA) | |
| Cas3 (E. coli) | CTT/CCT/CAT/CTC | None/blunt (ssDNA) | 32 |

See generally Wang, J., Zhang, C., & Feng, B. (2020). Journal of Cellular and Molecular Medicine, 24(6), 3256-3270, where N = any nucleotide; R = any purine (A or G); Y = any pyrimidine (C or T); W = A or T ; V = A, C or G.

[0241] In one aspect, the CRISPR/Cas system of the present disclosure comprises at least one RNA-guided nuclease (e.g. a Cas protein) derived from one or more of the following selected bacterial genera: Corynebacterium, Sutterella, Legionella, Treponema, Fiifactor, Eubacterium, Streptococcus, Lactobacillus, Mycoplasma, Bacteroides, Flavobacterium, Spirochaeta, Azospirillum, Gluconacetobacter, Neisseria, Roseburia, Parvibaculum, Nitratifractor, Campylobacter, Pseudomonas, Streptomyces, Staphylococcus, Francisella, Acidaminococcus, Lachnospiraceae, Leptotrichia, and Prevolella. In some embodiments, the Cas protein is derived from Deltaproteobacteria or Planctomycetes bacterial species.

[0242] Some aspects of the present disclosure provide strategies, methods, compositions, and treatment modalities for altering a targeted sequence within a gene locus (e.g., altering the sequence of wild type and/or of a mutant sequence within a cell or within a mammal) by insertion or deletion of one or more nucleotides mediated by an RNA-guided nuclease and one or more guide RNAs (gRNAs), resulting in loss of function of the targeted gene product. In some embodiments, the loss of function results in “knocking out” the gene of interest (i.e., generation of a “knock out”) by ablating gene expression. In some embodiments, the loss function results in a non-functional gene product (i.e., a gene product without all functionality of the wildtype gene product). In some embodiments, the loss of function results in expression of gene product with different characteristics (e.g., different binding affinity or different cellular localization).

[0243] In certain embodiments, the targeted gene is selected from (i) one or more growth factors or growth factor receptors (e.g., FGF2, CCN2, NGF, NTF3, NTF4, BDNF, FGFR1, NGFR, NTRK1, NTRK2), (ii) one or more metallproteases or regulators thereof (e.g., ADAM17, ADAMTS1, ADAMTS5, MMP1, MMP2, MMP3, MMP7, MMP8, MMP10, MMP12, MMP13, TIMP1, TIMP3), (iii) one or more cytokines, chemokines or cytokine/chemokine receptors (e.g., CXCL1, CXCL2, CXCL3, CXCL5, CXCL6, CXCL8, CCL2, CCL3, CCL5, CCL7, CCL20, IL1A, IL1B, IL4, IL6, IL10, IL13, IL17A, IL18, TNF, CXCR1, CXCR2, CCR7, TNFRSF1A, TNFRSF1B, IL1R1, IL1RAP, IL4R, IL6R, IL10RA, IL10RB, IL13RA1, IL13RA2, IL17RA, IL18R1, IL18RAP), (iv) one or more regulators of neuronal signaling (e.g., SCN1A, SCN2A, SCN3A, SCN4A, SCN5A, SCN8A, SCN9A, SCN10A, SCN11A, TAC1, TAC3, TACR1, TACR2, TACR3, ATP1A1), (v) one or more other regulators of cell signaling (e.g., CALCA, CALCB, CALCRL, RAMP1, ADM, CRCP, YAP1, MRGPRX2), and (vi) combinations of any genes of (i)-(v). In some embodiments, any region of the targeted gene (e.g., a promoter region, a 5′ untranslated region, a 3′ untranslated region, an exon, an intron, or an exon/intron border) is targeted by an RNA-guided nuclease to alter the gene. In some embodiments, a non-coding region of the targeted gene (e.g., an enhancer region, a promoter region, an intron, 5′ UTR, 3′ UTR, polyadenylation signal) is targeted to alter the gene.

### CRISPR Guide RNAs:

[0244] In one aspect, the CRISPR/Cas system of the present disclosure further provides a gRNA molecule (e.g., an isolated or non-naturally occurring RNA molecule) that interacts with the RNA-guided nuclease. In certain embodiments, the gRNA is an sgRNA comprising a crRNA sequence comprising a nucleotide sequence which is complementary to a sequence in a target nucleic acid. In some embodiments, the sgRNA further comprises an RNA scaffolding portion (i.e., tracrRNA) that interacts with the RNA-guided nuclease, such that the crRNA is positioned to scan a target nucleic acid for complementarity. In some embodiments, the system is further, optionally, comprised of an oligonucleotide—an HDR template with homology to either side of the target position. See Bloh, K., & Rivera-Torres, N. (2021). International Journal of Molecular Sciences, 22(8):3834.

[0245] In an embodiment, the RNA-guided nuclease and sgRNA are configured to orient an associated nuclease such that a cleavage event, (e.g., a double strand break or a single strand break) occurs sufficiently close to a complementary sequence in the targeted nucleic acid, thereby facilitating an alteration in the nucleic acid sequence. In some embodiments, the crRNA is 20 nucleotides in length. In some embodiments, the crRNA is 14, 15, 16, 17, 18, 19, 20, 21, 22, 23, 24, 25, 26, 27, 28, 29, or 30 nucleotides in length.

[0246] In some embodiments, the crRNA orients the RNA-guided nuclease such that a cleavage event occurs within 1, 2, 3, 4, 5, 10, 15, 20, 25, 30, 35, 40, 45, 50, 55, 60, 65, 70, 75, 80, 85, 90, 95, 100, 125, 150, 175, or 200 nucleotides away from the complementary sequence in the targeted nucleic acid. The double- or single-strand break may be positioned upstream or downstream of the complementary sequence in the targeted nucleic acid. In some embodiments, the cleavage event occurs within a targeted gene. In some embodiments, the cleavage event occurs upstream of a targeted gene.

[0247] In certain embodiments, a second gRNA molecule, comprising a second crRNA orients a second RNA-guided nuclease, such that a cleavage event occurs sufficiently close to a complementary sequence in the targeted nucleic acid, thereby facilitating an alteration in the nucleic acid sequence. In some embodiments, the first gRNA and the second gRNA promote a cleavage event within a single targeted gene. In some embodiments, the first gRNA and the second gRNA promote a cleavage event within different targeted genes. In some embodiments, the second crRNA is 20 nucleotides in length. In some embodiments, the second crRNA is 14, 15, 16, 17, 18, 19, 20, 21, 22, 23, 24, 25, 26, 27, 28, 29, or 30 nucleotides in length.

[0248] In some embodiments, the second crRNA orients the RNA-guided nuclease such that a cleavage event occurs within 1, 2, 3, 4, 5, 10, 15, 20, 25, 30, 35, 40, 45, 50, 55, 60, 65, 70, 75, 80, 85, 90, 95, 100, 125, 150, 175, or 200 nucleotides away from the complementary sequence in the targeted nucleic acid. The double- or single-strand break may be positioned upstream or downstream of the complementary sequence in the targeted nucleic acid. In some embodiments, the cleavage event occurs within a targeted gene. In some embodiments, the cleavage event occurs upstream of a targeted gene.

[0249] In some embodiments, the targeting domains of the first gRNA and the second gRNA are configured such that a cleavage event is positioned, independently for each of the gRNA molecules, within 1, 2, 3, 4, 5, 10, 15, 20, 25, 30, 35, 40, 45, 50, 55, 60, 65, 70, 75, 80, 85, 90, 95, 100, 125, 150, 175, or 200 nucleotides of the others cleavage event. In some embodiments, the first gRNA and the second gRNA molecules alter the targeted nucleic acid sequences simultaneously. In some embodiments, the first gRNA and the second gRNA molecules alter the targeted nucleic acid sequences sequentially.

[0250] In some embodiments, a single-strand break is accompanied by a second single-strand break, positioned by the crRNA of a first gRNA and a second gRNA, respectively. For example, the crRNA may orient the associated RNA-guided nucleases such that a cleavage event, (e.g., the two single-strand breaks), are positioned within 1, 2, 3, 4, 5, 10, 15, 20, 25, 30, 35, 40, 45, 50, 55, 60, 65, 70, 75, 80, 85, 90, 95, 100, 125, 150, 175, or 200 nucleotides of one another. In some embodiments, a first crRNA and a second crRNA are configured to orient associated RNA-guided nucleases such that, for example, two single-strand breaks occur at the same position, or within 1, 2, 3, 4, 5, 10, 15, 20, 25, 30, 35, 40, 45, 50 nucleotides of one another, on opposing strands of genomic DNA, thereby essentially approximating a double strand break.

[0251] In some embodiments a nucleic acid encodes a second sgRNA molecule. In some embodiments, a nucleic acid encodes a third sgRNA molecule. In some embodiments, a nucleic acid encodes a fourth sgRNA molecule.

[0252] In certain embodiments, a nucleic acid may comprise (a) a sequence encoding a first sgRNA, comprising a crRNA that is complementary with a sequence in a targeted gene, (b) a sequence encoding a second sgRNA, comprising a crRNA that is complementary with a sequence in a second targeted gene, and (c) a sequence encoding an RNA-guided nuclease (e.g., Cas9). Optionally, (d) and (e) are sequences encoding a third sgRNA and a fourth sgRNA, respectively. In some embodiments, the second targeted gene is the same as the first targeted gene. In other embodiments, the second targeted gene is different from the first targeted gene. In some embodiments, (a), (b), and (c) are encoded within the same nucleic acid molecule (e.g., the same vector). In some embodiments, (a) and (b) are encoded within the same nucleic acid molecule. In some embodiments, (a), (b) and (d) are encoded within the same nucleic acid molecule. In some embodiments, (a), (b) and (e) are encoded within the same nucleic acid molecule. In some embodiments, (a), (b), (d) and (e) are encoded within the same nucleic acid molecule. In some embodiments, (a), (b), and (c) are encoded within separate nucleic acid molecules. When more than two sgRNAs are used, any combination of (a), (b), (c), (d) and (e) may be encoded within a single or separate nucleic acid molecules.

[0253] In one aspect, the nucleic acid molecules (i.e., those encoding (a), (b), (c), (d) or (e)) are delivered to a target cell (i.e., any combination of the encoded RNA-guided nuclease of (c) and at least one encoded gRNA molecule of (a), (b), (d), or (e) contact a target cell). In some embodiments, said nucleic acid molecules are delivered to a target cell in vivo. In other embodiments, said nucleic acid molecules are delivered to a target cell ex vivo. In some embodiments, said nucleic acid molecules are delivered to a target cell in vitro. In certain embodiments, said nucleic acid molecules are delivered to a target cell as DNA. In other embodiments, said nucleic acid molecules are delivered to a target cell as RNA (e.g., mRNA). In some embodiments, the products of said nucleic acid molecules are delivered as an assembled ribonucleoprotein (RNP).

[0254] In some embodiments, contacting a target cell comprises delivering said RNA-guided nuclease of (c), as a protein with at least one said nucleic acid molecules selected from (a), (b), (d), and (e). In some embodiments, contacting a target cell comprises delivering said encoded RNA-guided nuclease of (c), as DNA with at least one said nucleic acid molecules selected from (a), (b), (d), and (e). In some embodiments, contacting a target cell comprises delivering said encoded RNA-guided nuclease of (c), as mRNA with at least one said nucleic acid molecules selected from (a), (b), (d), and (e).

[0255] In certain embodiments, CRISPR components are delivered to a target cell via nanoparticles. Exemplary nanoparticles that may be used with all CRISPR/Cas systems disclosed herein include, at least, lipid nanoparticles or liposomes, hydrogel nanoparticles, metalorganic nanoparticles, gold nanoparticles, magnetic nanoparticles and virus-like particles. See generally Xu, C. F. et al. (2021). Advanced Drug Delivery Reviews, 168:3-29. In some embodiments, CRISPR components of the present disclosure are encapsulated in an LNP system described herein, e.g., and without limitation, any one of LNP systems LNP001 to LNP240.

### B. TALEN

[0256] In one aspect, the present disclosure contemplates use of methods, components, and compositions relating to Transcription Activator-Like Effector Nucleases (TALENs) to effectuate augmentation of a ‘nucleic acid sequence (e.g., a targeted gene.

[0257] TALE stands for “Transcription Activator-Like Effector” proteins, which include TALENs (“Transcription Activator-Like Effector Nucleases”). A method of using a TALE system for gene editing may also be referred to herein as a TALE method. TALEs are naturally occurring proteins from the plant pathogenic bacteria genus Xanthomonas, and contain DNA-binding domains composed of a series of 33-35-amino-acid repeat domains that each recognizes a single base pair. TALE specificity is determined by two hypervariable amino acids that are known as the repeat-variable di-residues (RVDs). Modular TALE repeats are linked together to recognize contiguous DNA sequences. A specific RVD in the DNA-binding domain recognizes a base in the target locus, providing a structural feature to assemble predictable DNA-binding domains. The DNA binding domains of a TALE are fused to the catalytic domain of a type IIS FokI endonuclease to make a targetable TALE nuclease. To induce site-specific mutation, two individual TALEN arms, separated by a 14-20 base pair spacer region, bring FokI monomers in close proximity to dimerize and produce a targeted double-strand break.

[0258] Several large, systematic studies utilizing various assembly methods have indicated that TALE repeats can be combined to recognize virtually any user-defined sequence. Custom-designed TALE arrays are also commercially available through Cellectis Bioresearch (Paris, France), Transposagen Biopharmaceuticals (Lexington, KY, USA), and Life Technologies (Grand Island, NY, USA). TALE and TALEN methods suitable for use in the present disclosure are described in U.S. Patent Application Publication Nos. US 2011/0201118 A1; US 2013/0117869 A1; US 2013/0315884 A1; US 2015/0203871 A1 and US 2016/0120906 A1, the disclosures of which are incorporated by reference herein.

[0259] Non-limiting examples of genes that may be silenced or inhibited by permanently gene-editing via a TALE method include (i) one or more growth factors or growth factor receptors (e.g., FGF2, CCN2, NGF, NTF3, NTF4, BDNF, FGFR1, NGFR, NTRK1, NTRK2), (ii) one or more metallproteases or regulators thereof (e.g., ADAM17, ADAMTS1, ADAMTS5, MMP1, MMP2, MMP3, MMP7, MMP8, MMP10, MMP12, MMP13, TIMP1, TIMP3), (iii) one or more cytokines, chemokines or cytokine/chemokine receptors (e.g., CXCL1, CXCL2, CXCL3, CXCL5, CXCL6, CXCL8, CCL2, CCL3, CCL5, CCL7, CCL20, IL1A, IL1B, IL4, IL6, IL10, IL13, IL17A, IL18, TNF, CXCR1, CXCR2, CCR7, TNFRSF1A, TNFRSF1B, IL1R1, IL1RAP, IL4R, IL6R, IL10RA, IL10RB, IL13RA1, IL13RA2, IL17RA, IL18R1, IL18RAP), (iv) one or more regulators of neuronal signaling (e.g., SCN1A, SCN2A, SCN3A, SCN4A, SCN5A, SCN8A, SCN9A, SCN10A, SCN11A, TAC1, TAC3, TACR1, TACR2, TACR3, ATP1A1), (v) one or more other regulators of cell signaling (e.g., CALCA, CALCB, CALCRL, RAMP1, ADM, CRCP, YAP1, MRGPRX2), and (vi) combinations of any genes of (i)-(v). In an aspect, the disclosure provides compositions for up-regulation of protein receptors (including wildtype or genetically edited), including those that bind to anti-inflammatory cytokines via a TALE method.

[0260] Examples of systems, methods, and compositions for altering the expression of a target gene sequence by a TALE method, and which may be used in accordance with embodiments of the present disclosure, are described in U.S. Pat. No. 8,586,526, which is incorporated by reference herein.

### C. Zinc-Finger Nucleases (ZFN)

[0261] In one aspect, the present disclosure contemplates use of methods, components, and compositions relating to zinc-finger nucleases (ZFNs) to effectuate augmentation of a ‘nucleic acid sequence (e.g., a targeted gene).

[0262] An individual zinc finger contains approximately 30 amino acids in a conserved ββα configuration. Several amino acids on the surface of the α-helix typically contact 3 bp in the major groove of DNA, with varying levels of selectivity. Zinc fingers have two protein domains. The first domain is the DNA binding domain, which includes eukaryotic transcription factors and contain the zinc finger. The second domain is the nuclease domain, which includes the FokI restriction enzyme and is responsible for the catalytic cleavage of DNA.

[0263] The DNA-binding domains of individual ZFNs typically contain between three and six individual zinc finger repeats and can each recognize between 9 and 18 base pairs. If the zinc finger domains are specific for their intended target site then even a pair of 3-finger ZFNs that recognize a total of 18 base pairs can, in theory, target a single locus in a mammalian genome. One method to generate new zinc-finger arrays is to combine smaller zinc-finger “modules” of known specificity. The most common modular assembly process involves combining three separate zinc fingers that can each recognize a 3 base pair DNA sequence to generate a 3-finger array that can recognize a 9 base pair target site. Alternatively, selection-based approaches, such as oligomerized pool engineering (OPEN) can be used to select for new zinc-finger arrays from randomized libraries that take into consideration context-dependent interactions between neighboring fingers. Engineered zinc fingers are available commercially; Sangamo Biosciences (Richmond, CA, USA) has developed a propriety platform (CompoZr®) for zinc-finger construction in partnership with Sigma-Aldrich (St. Louis, MO, USA).

[0264] Non-limiting examples of genes that may be silenced or inhibited by permanently gene-editing via a zinc finger method include (i) one or more growth factors or growth factor receptors (e.g., FGF2, CCN2, NGF, NTF3, NTF4, BDNF, FGFR1, NGFR, NTRK11, NTRK2), (ii) one or more metallproteases or regulators thereof (e.g., ADAM17, ADAMTS1, ADAMTS5, MMP1, MMP2, MMP3, MMP7, MMP8, MMP10, MMP12, MMP13, TIMP1, TIMP3), (iii) one or more cytokines, chemokines or cytokine/chemokine receptors (e.g., CXCL1, CXCL2, CXCL3, CXCL5, CXCL6, CXCL8, CCL2, CCL3, CCL5, CCL7, CCL20, IL1A, IL1B, IL4, IL6, IL10, IL13, IL17A, IL18, TNF, CXCR1, CXCR2, CCR7, TNFRSF1A, TNFRSF1B, IL1R1, IL1RAP, IL4R, IL6R, IL10RA, IL10RB, IL13RA1, IL13RA2, IL17RA, IL18R1, IL18RAP), (iv) one or more regulators of neuronal signaling (e.g., SCN1A, SCN2A, SCN3A, SCN4A, SCN5A, SCN8A, SCN9A, SCN10A, SCN11A, TAC1, TAC3, TACR1, TACR2, TACR3, ATP1A1), (v) one or more other regulators of cell signaling (e.g., CALCA, CALCB, CALCRL, RAMP1, ADM, CRCP, YAP1, MRGPRX2), and (vi) combinations of any genes of (i)-(v). Non-limiting examples of genes that may be augmented such that their resultant products function as decoys or dominant negatives by permanently gene-editing via a zinc finger method include. In an aspect, the disclosure provides compositions for up-regulation of protein receptors (including wildtype or genetically edited), including those that bind to anti-inflammatory cytokines via a zinc finger method.

[0265] Examples of systems, methods, and compositions for altering the expression of a target gene sequence by a zinc finger method, which may be used in accordance with embodiments of the present disclosure, are described in U.S. Pat. Nos. 6,534,261, 6,607,882, 6,746,838, 6,794,136, 6,824,978, 6,866,997, 6,933,113, 6,979,539, 7,013,219, 7,030,215, 7,220,719, 7,241,573, 7,241,574, 7,585,849, 7,595,376, 6,903,185, and 6,479,626, which are incorporated by reference herein.

[0266] Other examples of systems, methods, and compositions for altering the expression of a target gene sequence by a zinc finger method, which may be used in accordance with embodiments of the present disclosure, are described in Beane, et al., Mol. Therapy, 2015, 23 1380-1390, the disclosure of which is incorporated by reference herein.

### IV. Joint Disease or Illness

### A. Introduction

[0267] As described herein, embodiments of the present disclosure provide compositions and methods for improving joint function and treating joint disease. In particular embodiments, compositions and methods are provided to gene-edit synovial fibroblasts, synoviocytes, chondrocytes, tissue (resident) macrophages, or other cells to reduce pro-inflammatory signaling mediated by the binding of inflammatory cytokines-including, but not limited to, IL1α, IL1β, TNFα, IL6, IL8, IL18, IL33, matrix metalloproteinases (MMPs), TGFβ1, TGFβ2, and combinations thereof—to their cognate receptor(s). Some embodiments are used for treating various forms of arthritis and other inflammatory joint diseases. Some embodiments are further useful for treating canine lameness due to osteoarthritis. Some embodiments are further useful for treating equine lameness due to joint disease. Some embodiments are further useful for treating feline lameness due to joint disease. Some embodiments are also useful for treating post-traumatic arthritis, gout, pseudogout, psoriatic arthritis, and other inflammation-mediated or immune-mediated joint diseases. Some embodiments are further useful as it relates to encapsulation in an LNP system described herein, e.g., and without limitation, any one of LNP systems LNP001 to LNP240.

[0268] Treatment of osteoarthritis, degenerative joint disease, and other joint dysfunctions is complex, and few long-term options exist for either symptomatic relief or restoring joint function. Osteoarthritis (OA) is the leading cause of disability due to pain. See, Neogi, T. (2013). Osteoarthritis Cartilage, 21(9):1145-53. OA and similar diseases impact all mammal species, including working animals, domestic pets, and their owners. The common mechanistic thread among joint diseases is the presence of acute of chronic inflammation, which is driven by increased levels of pro-inflammatory cytokine signaling. Joint diseases tend to take a progressive course that encompasses discomfort, pain, and—especially in the case of OA—disability, depending on the degree of disease progression.

[0269] Psoriatic arthritis (PsA) is another chronic inflammatory joint disease, in which the joint symptoms are accompanied by skin lesions, such as those commonly associated with psoriasis. See, Boehncke, W. et al. (2014). British Journal of Dermatology, 170(4):772-786. Like other forms of arthritis, such as OA, PsA is caused by pro-inflammatory signaling of a host of cytokines, including IL1. Indeed, PsA morbidity has been shown to correlate with single nucleotide polymorphisms (SNPs) that impact the activity of the IL1 gene locus. See, Rahman, P. et al. (2006). Arthritis and Rheumatism, 54(7):2321-2325. These studies also implicate inflammatory cytokine signaling, in general, and IL1 more specifically, in disease progression.

[0270] Gout is a chronic inflammatory condition that affects joints. The underlying cause is monosodium urate (MSU) crystal deposition and the resultant host response, particularly in joint structures (as well as subcutaneous tissues and other sites). See, Dalbeth, N., & Stamp, L. (2014). Annals of the Rheumatic Diseases, 73(9):1598-1600. The clinical manifestations include recurrent acute flares of severe inflammatory arthritis and tendinobursitis. IL1 and other pro-inflammotory mediators are a major contributor to this host response. See, Dinarello, C. A. (2014). Molecular Medicine, 20(1):S43-S58. To this end, effective blockade of these signaling pathways may provide relief to gout patients.

[0271] The current standard of care for many joint disease patients includes anti-inflammatory medications (e.g., NSAIDs) or anti-rheumatics (e.g., methotrexate [inhibitor of AICAR] or adalimumab [anti-TNF alpha monoclonal antibody]). See, Friedman, B., & Cronstein, B. (2019). Joint Bone Spine, 86(3):301-307. All of these treatments require repeated dosing for continued effectiveness, which may lead to toxicity issues or tolerance over time. As such, new methods and compositions to treat joint disease and illness are acutely needed to treat these chronic conditions.

[0272] In one aspect, the compositions and methods herein described are directed to treat joint disease or illness in a mammal in need thereof. In some embodiments, the joint disease or illness is osteoarthritis. In some embodiments, the joint disease or illness is psoriatic arthritis. In some embodiments, the joint disease or illness is gout.

[0273] Among the advantages of the present disclosure over treatments currently available for mammals afflicted with one or more joint disease or illness include the period of relief from symptoms. Upon genetic editing of a cell within a joint, pro-inflammatory signaling is silenced through the targeted gene for the life of that cell and any mitotic progeny. By contrast, biologic treatments require periodic dosing, which may magnify the impact of the host of potentially severe side effects. Among various genetic approaches, the present disclosure is also superior due to, among other reasons, a resistance to leakiness by virtue of modifying a protein receptor, rather than ablating expression of a ligand, which may result in compensatory effects (e.g., buildup of other factors due to lack of negative feedback).

[0274] In some embodiments, the present disclosure includes a method for the treatment or prevention of a joint disease or condition in a subject in need thereof, the method comprising administering, to a joint of the subject, a pharmaceutical composition comprising a therapeutically effective amount of a Clustered Regularly Interspaced Short Palindromic Repeats (CRISPR) gene-editing system, the system comprising (i) a CRISPR Associated (Cas) protein; and (ii) at least one guide RNA targeting an IL1R1 gene, IL1RAP gene, TGFBR1 gene, TGFBR2 gene, IL6R gene, IL6ST gene, TNFRSF1A gene, TNFRSF1B gene, TNFRSF3 gene, TNFRSF4 gene, or TNFRSF11A gene or a combination thereof. In some embodiments, the joint disease or condition is osteoarthritis. In some embodiments, the joint disease or condition is psoriatic arthritis. In some embodiments, the joint disease or condition is gout.

[0275] In some embodiments, the present disclosure includes a method for the treatment or prevention of an arthritis. Non-limiting examples of arthritis the can be treated using the compositions and methods described herein include post-tramatic arthritis, osteoarthritis (a degenerative condition that affects the joints, most commonly the hips, knees, and hands), rheumatoid arthritis (an autoimmune disorder that causes inflammation in the joints and surrounding tissue), psoriatic arthritis (a type of arthritis that occurs in people with psoriasis, a skin condition characterized by scaly red patches), gout (a type of arthritis caused by the buildup of uric acid crystals in the joints), lupus (a chronic autoimmune disorder that can cause inflammation and damage to the joints, as well as other organs), ankylosing spondylitis (a type of arthritis that primarily affects the spine, causing inflammation and stiffness), reactive arthritis (a type of arthritis that occurs as a reaction to an infection in the body), septic arthritis (a type of arthritis caused by an infection in the joint), juvenile idiopathic arthritis (a form of arthritis that affects children under the age of 16), and fibromyalgia (a chronic pain disorder that can cause widespread pain and stiffness, including in the joints).

[0276] In some embodiments, the present disclosure includes a method for the treatment or prevention of pseudogout, Crystal arthropathies (caused by the formation of crystals in the joints, such as gout and pseudogout), or CPPD disease (calcium pyrophosphate deposition disease) also called chondroclacinosis.

[0277] In some embodiments, the present disclosure includes a method for the treatment or prevention of rheumatoid arthritis, psoriasis, asthma, inflammatory bowel disease, multiple sclerosis, Alzheimer's disease, Type 2 diabetes, cardiovascular disease, or cancer. In some embodiments, these disorders are treated by administering a CRISPR composition, as described herein, targeting an IL1 receptor, e.g., IL1R1 or IL1RAP.

### B. Osteoarthritis

[0278] In one aspect, the present disclosure encompasses treatments for osteoarthritis (OA). In some embodiments, OA treatment comprises a therapeutically effective amount of a Clustered Regularly Interspaced Short Palindromic Repeats (CRISPR) gene-editing system, the system comprising: (i) a CRISPR Associated (Cas) protein; and (ii) at least one guide RNA targeting IL1R1. In some embodiments, the OA treatment comprises a CRISPR gene-editing system targeting hIL1R1. In some embodiments, the OA treatment comprises a CRISPR gene-editing system targeting cIL1R1. In some embodiments, the OA treatment comprises a CRISP gene-editing system R targeting eIL1R1. In some embodiments, the OA treatment comprises a CRISPR gene-editing system targeting fIL1R1. In some embodiments, the CRISPR gene-editing system for the treatment of OA comprising one or more sgRNAs targeting an exon of IL1R1 is delivered via one or more lipid nanoparticles (LNPs), the LNPs comprising an LNP system described herein, e.g., and without limitation, any one of LNP systems LNP001 to LNP240.

[0279] In some embodiments, the CRISPR gene-editing system for the treatment of OA comprises one or more sgRNAs targeting exon 1 of hIL1R1. In some embodiments, the CRISPR gene-editing system for the treatment of OA comprises one or more sgRNAs targeting exon 2 of hIL1R1. In some embodiments, the CRISPR gene-editing system for the treatment of OA comprises one or more sgRNAs targeting exon 3 of hIL1R1. In some embodiments, the CRISPR gene-editing system for the treatment of OA comprises one or more sgRNAs targeting exon 4 of hIL1R1. In some embodiments, the CRISPR gene-editing system for the treatment of OA comprises one or more sgRNAs targeting exon 5 of hIL1R1. In some embodiments, the CRISPR gene-editing system for the treatment of OA comprises one or more sgRNAs targeting exon 6 of hIL1R1. In some embodiments, the CRISPR gene-editing system for the treatment of OA comprises one or more sgRNAs targeting exon 7 of hIL1R1. In some embodiments, the CRISPR gene-editing system for the treatment of OA comprises one or more sgRNAs targeting exon 8 of hIL1R1. In some embodiments, the CRISPR gene-editing system for the treatment of OA comprises one or more sgRNAs targeting exon 9 of hIL1R1. In some embodiments, the CRISPR gene-editing system for the treatment of OA comprises one or more sgRNAs targeting exon 10 of hIL1R1. In some embodiments, the CRISPR gene-editing system for the treatment of OA comprises one or more sgRNAs targeting exon 11 of hIL1R1. In some embodiments, the CRISPR gene-editing system for the treatment of OA comprises one or more sgRNAs targeting exon 12 of hIL1R1. In some embodiments, the CRISPR gene-editing system for the treatment of OA comprises one or more sgRNAs targeting exon 13 of hIL1R1. In some embodiments, the CRISPR gene-editing system for the treatment of OA comprises one or more sgRNAs targeting exon 14 of hIL1R1. In some embodiments, the CRISPR gene-editing system for the treatment of OA comprises one or more sgRNAs targeting exon 15 of hIL1R1. In some embodiments, the CRISPR gene-editing system for the treatment of OA comprises one or more sgRNAs targeting exon 16 of hIL1R1. In some embodiments, the CRISPR gene-editing system for the treatment of OA comprises one or more sgRNAs targeting exon 17 of hIL1R1. In some embodiments, the CRISPR gene-editing system for the treatment of OA comprises one or more sgRNAs targeting exon 18 of hIL1R1. In some embodiments, the CRISPR gene-editing system for the treatment of OA comprises one or more sgRNAs targeting exon 19 of hIL1R1. In some embodiments, the CRISPR gene-editing system for the treatment of OA comprises one or more sgRNAs targeting exon 20 of hIL1R1. In some embodiments, the CRISPR gene-editing system for the treatment of OA comprises one or more sgRNAs targeting exon 21 of hIL1R1. In some embodiments, the CRISPR gene-editing system for the treatment of OA comprising one or more sgRNAs targeting an exon of hIL1R1 is delivered via one or more lipid nanoparticles (LNPs), the LNPs comprising an LNP system described herein, e.g., and without limitation, any one of LNP systems LNP001 to LNP240.

[0280] In some embodiments, the CRISPR gene-editing system for the treatment of OA comprises one or more sgRNAs targeting exon 1 of cIL1R1. In some embodiments, the CRISPR gene-editing system for the treatment of OA comprises one or more sgRNAs targeting exon 2 of cIL1R1. In some embodiments, the CRISPR gene-editing system for the treatment of OA comprises one or more sgRNAs targeting exon 3 of cIL1R1. In some embodiments, the CRISPR gene-editing system for the treatment of OA comprises one or more sgRNAs targeting exon 4 of cIL1R1. In some embodiments, the CRISPR gene-editing system for the treatment of OA comprises one or more sgRNAs targeting exon 5 of cIL1R1. In some embodiments, the CRISPR gene-editing system for the treatment of OA comprises one or more sgRNAs targeting exon 6 of cIL1R1. In some embodiments, the CRISPR gene-editing system for the treatment of OA comprises one or more sgRNAs targeting exon 7 of cIL1R1. In some embodiments, the CRISPR gene-editing system for the treatment of OA comprises one or more sgRNAs targeting exon 8 of cIL1R1. In some embodiments, the CRISPR gene-editing system for the treatment of OA comprises one or more sgRNAs targeting exon 9 of cIL1R1. In some embodiments, the CRISPR gene-editing system for the treatment of OA comprises one or more sgRNAs targeting exon 10 of cIL1R1. In some embodiments, the CRISPR gene-editing system for the treatment of OA comprises one or more sgRNAs targeting exon 11 of cIL1R1. In some embodiments, the CRISPR gene-editing system for the treatment of OA comprises one or more sgRNAs targeting exon 12 of cIL1R1. In some embodiments, the CRISPR gene-editing system for the treatment of OA comprises one or more sgRNAs targeting exon 13 of cIL1R1. In some embodiments, the CRISPR gene-editing system for the treatment of OA comprises one or more sgRNAs targeting exon 14 of cIL1R1. In some embodiments, the CRISPR gene-editing system for the treatment of OA comprises one or more sgRNAs targeting exon 15 of cIL1R1. In some embodiments, the CRISPR gene-editing system for the treatment of OA comprises one or more sgRNAs targeting exon 16 of cIL1R1. In some embodiments, the CRISPR gene-editing system for the treatment of OA comprising one or more sgRNAs targeting an exon of cIL1R1 is delivered via one or more lipid nanoparticles (LNPs), the LNPs comprising an LNP system described herein, e.g., and without limitation, any one of LNP systems LNP001 to LNP240.

[0281] In some embodiments, the CRISPR gene-editing system for the treatment of OA comprises one or more sgRNAs targeting exon 1 of eIL1R1. In some embodiments, the CRISPR gene-editing system for the treatment of OA comprises one or more sgRNAs targeting exon 2 of eIL1R1. In some embodiments, the CRISPR gene-editing system for the treatment of OA comprises one or more sgRNAs targeting exon 3 of eIL1R1. In some embodiments, the CRISPR gene-editing system for the treatment of OA comprises one or more sgRNAs targeting exon 4 of eIL1R1. In some embodiments, the CRISPR gene-editing system for the treatment of OA comprises one or more sgRNAs targeting exon 5 of eIL1R1. In some embodiments, the CRISPR gene-editing system for the treatment of OA comprises one or more sgRNAs targeting exon 6 of eIL1R1. In some embodiments, the CRISPR gene-editing system for the treatment of OA comprises one or more sgRNAs targeting exon 7 of eIL1R1. In some embodiments, the CRISPR gene-editing system for the treatment of OA comprises one or more sgRNAs targeting exon 8 of eIL1R1. In some embodiments, the CRISPR gene-editing system for the treatment of OA comprises one or more sgRNAs targeting exon 9 of eIL1R1. In some embodiments, the CRISPR gene-editing system for the treatment of OA comprises one or more sgRNAs targeting exon 10 of eIL1R1. In some embodiments, the CRISPR gene-editing system for the treatment of OA comprises one or more sgRNAs targeting exon 11 of eIL1R1. In some embodiments, the CRISPR gene-editing system for the treatment of OA comprises one or more sgRNAs targeting exon 12 of eIL1R1. In some embodiments, the CRISPR gene-editing system for the treatment of OA comprises one or more sgRNAs targeting exon 13 of eIL1R1. In some embodiments, the CRISPR gene-editing system for the treatment of OA comprises one or more sgRNAs targeting exon 14 of eIL1R1. In some embodiments, the CRISPR gene-editing system for the treatment of OA comprises one or more sgRNAs targeting exon 15 of eIL1R1. In some embodiments, the CRISPR gene-editing system for the treatment of OA comprising one or more sgRNAs targeting an exon of eIL1R1 is delivered via one or more lipid nanoparticles (LNPs), the LNPs comprising an LNP system described herein, e.g., and without limitation, any one of LNP systems LNP001 to LNP240.

[0282] In some embodiments, the CRISPR gene-editing system for the treatment of OA comprises one or more sgRNAs targeting exon 1 of fIL1R1. In some embodiments, the CRISPR gene-editing system for the treatment of OA comprises one or more sgRNAs targeting exon 2 of fIL1R1. In some embodiments, the CRISPR gene-editing system for the treatment of OA comprises one or more sgRNAs targeting exon 3 of fIL1R1. In some embodiments, the CRISPR gene-editing system for the treatment of OA comprises one or more sgRNAs targeting exon 4 of fIL1R1. In some embodiments, the CRISPR gene-editing system for the treatment of OA comprises one or more sgRNAs targeting exon 5 of fIL1R1. In some embodiments, the CRISPR gene-editing system for the treatment of OA comprises one or more sgRNAs targeting exon 6 of fIL1R1. In some embodiments, the CRISPR gene-editing system for the treatment of OA comprises one or more sgRNAs targeting exon 7 of fIL1R1. In some embodiments, the CRISPR gene-editing system for the treatment of OA comprises one or more sgRNAs targeting exon 8 of fIL1R1. In some embodiments, the CRISPR gene-editing system for the treatment of OA comprises one or more sgRNAs targeting exon 9 of fIL1R1. In some embodiments, the CRISPR gene-editing system for the treatment of OA comprises one or more sgRNAs targeting exon 10 of fIL1R1. In some embodiments, the CRISPR gene-editing system for the treatment of OA comprises one or more sgRNAs targeting exon 11 of fIL1R. In some embodiments, the CRISPR gene-editing system for the treatment of OA comprises one or more sgRNAs targeting exon 12 of fIL1R1. In some embodiments, the CRISPR gene-editing system for the treatment of OA comprises one or more sgRNAs targeting exon 13 of fIL1R1. In some embodiments, the CRISPR gene-editing system for the treatment of OA comprises one or more sgRNAs targeting exon 14 of fIL1R1. In some embodiments, the CRISPR gene-editing system for the treatment of OA comprises one or more sgRNAs targeting exon 15 of fIL1R1. In some embodiments, the CRISPR gene-editing system for the treatment of OA comprises one or more sgRNAs targeting exon 16 of fIL1R1. In some embodiments, the CRISPR gene-editing system for the treatment of OA comprises one or more sgRNAs targeting exon 17 of fIL1R1. In some embodiments, the CRISPR gene-editing system for the treatment of OA comprises one or more sgRNAs targeting exon 18 of fIL1R1. In some embodiments, the CRISPR gene-editing system for the treatment of OA comprising one or more sgRNAs targeting an exon of fIL1R1 is delivered via one or more lipid nanoparticles (LNPs), the LNPs comprising an LNP system described herein, e.g., and without limitation, any one of LNP systems LNP001 to LNP240.

[0283] In some embodiments, the CRISPR gene-editing system for the treatment of OA comprises one or more sgRNAs targeting IL1RAP. In some embodiments, the CRISPR gene-editing system for the treatment of OA comprises one or more sgRNAs targeting hIL1RAP. In some embodiments, the CRISPR gene-editing system for the treatment of OA comprises one or more sgRNAs targeting cIL1RAP. In some embodiments, the CRISPR gene-editing system for the treatment of OA comprises one or more sgRNAs targeting eIL1RAP. In some embodiments, the CRISPR gene-editing system for the treatment of OA comprises one or more sgRNAs targeting fIL1RAP. In some embodiments, the CRISPR gene-editing system for the treatment of OA comprising one or more sgRNAs targeting an exon of IL1RAP is delivered via one or more lipid nanoparticles (LNPs), the LNPs comprising an LNP system described herein, e.g., and without limitation, any one of LNP systems LNP001 to LNP240.

[0284] In some embodiments, the CRISPR gene-editing system for the treatment of OA comprises one or more sgRNAs targeting exon 1 of hIL1RAP. In some embodiments, the CRISPR gene-editing system for the treatment of OA comprises one or more sgRNAs targeting exon 2 of hIL1RAP. In some embodiments, the CRISPR gene-editing system for the treatment of OA comprises one or more sgRNAs targeting exon 3 of hIL1RAP. In some embodiments, the CRISPR gene-editing system for the treatment of OA comprises one or more sgRNAs targeting exon 4 of hIL1RAP. In some embodiments, the CRISPR gene-editing system for the treatment of OA comprises one or more sgRNAs targeting exon 5 of hIL1RAP. In some embodiments, the CRISPR gene-editing system for the treatment of OA comprises one or more sgRNAs targeting exon 6 of hIL1RAP. In some embodiments, the CRISPR gene-editing system for the treatment of OA comprises one or more sgRNAs targeting exon 7 of hIL1RAP. In some embodiments, the CRISPR gene-editing system for the treatment of OA comprises one or more sgRNAs targeting exon 8 of hIL1RAP. In some embodiments, the CRISPR gene-editing system for the treatment of OA comprises one or more sgRNAs targeting exon 9 of hIL1RAP. In some embodiments, the CRISPR gene-editing system for the treatment of OA comprises one or more sgRNAs targeting exon 10 of hIL1RAP. In some embodiments, the CRISPR gene-editing system for the treatment of OA comprises one or more sgRNAs targeting exon 11 of hIL1RAP. In some embodiments, the CRISPR gene-editing system for the treatment of OA comprises one or more sgRNAs targeting exon 12 of hIL1RAP. In some embodiments, the CRISPR gene-editing system for the treatment of OA comprises one or more sgRNAs targeting exon 13 of hIL1RAP. In some embodiments, the CRISPR gene-editing system for the treatment of OA comprises one or more sgRNAs targeting exon 14 of hIL1RAP. In some embodiments, the CRISPR gene-editing system for the treatment of OA comprises one or more sgRNAs targeting exon 15 of hIL1RAP. In some embodiments, the CRISPR gene-editing system for the treatment of OA comprises one or more sgRNAs targeting exon 16 of hIL1RAP. In some embodiments, the CRISPR gene-editing system for the treatment of OA comprises one or more sgRNAs targeting exon 17 of hIL1RAP. In some embodiments, the CRISPR gene-editing system for the treatment of OA comprising one or more sgRNAs targeting an exon of hIL1RAP is delivered via one or more lipid nanoparticles (LNPs), the LNPs comprising an LNP system described herein, e.g., and without limitation, any one of LNP systems LNP001 to LNP240.

[0285] In some embodiments, the CRISPR gene-editing system for the treatment of OA comprises one or more sgRNAs targeting exon 1 of cIL1RAP. In some embodiments, the CRISPR gene-editing system for the treatment of OA comprises one or more sgRNAs targeting exon 2 of cIL1RAP. In some embodiments, the CRISPR gene-editing system for the treatment of OA comprises one or more sgRNAs targeting exon 3 of cIL1RAP. In some embodiments, the CRISPR gene-editing system for the treatment of OA comprises one or more sgRNAs targeting exon 4 of cIL1RAP. In some embodiments, the CRISPR gene-editing system for the treatment of OA comprises one or more sgRNAs targeting exon 5 of cIL1RAP. In some embodiments, the CRISPR gene-editing system for the treatment of OA comprises one or more sgRNAs targeting exon 6 of cIL1RAP. In some embodiments, the CRISPR gene-editing system for the treatment of OA comprises one or more sgRNAs targeting exon 7 of cIL1RAP. In some embodiments, the CRISPR gene-editing system for the treatment of OA comprises one or more sgRNAs targeting exon 8 of cIL1RAP. In some embodiments, the CRISPR gene-editing system for the treatment of OA comprises one or more sgRNAs targeting exon 9 of cIL1RAP. In some embodiments, the CRISPR gene-editing system for the treatment of OA comprises one or more sgRNAs targeting exon 10 of cIL1RAP. In some embodiments, the CRISPR gene-editing system for the treatment of OA comprises one or more sgRNAs targeting exon 11 of cIL1RAP. In some embodiments, the CRISPR gene-editing system for the treatment of OA comprises one or more sgRNAs targeting exon 12 of cIL1RAP. In some embodiments, the CRISPR gene-editing system for the treatment of OA comprises one or more sgRNAs targeting exon 13 of cIL1RAP. In some embodiments, the CRISPR gene-editing system for the treatment of OA comprises one or more sgRNAs targeting exon 14 of cIL1RAP. In some embodiments, the CRISPR gene-editing system for the treatment of OA comprises one or more sgRNAs targeting exon 15 of cIL1RAP. In some embodiments, the CRISPR gene-editing system for the treatment of OA comprises one or more sgRNAs targeting exon 16 of cIL1RAP. In some embodiments, the CRISPR gene-editing system for the treatment of OA comprising one or more sgRNAs targeting an exon of cIL1RAP is delivered via one or more lipid nanoparticles (LNPs), the LNPs comprising an LNP system described herein, e.g., and without limitation, any one of LNP systems LNP001 to LNP240.

[0286] In some embodiments, the CRISPR gene-editing system for the treatment of OA comprises one or more sgRNAs targeting exon 1 of eIL1RAP. In some embodiments, the CRISPR gene-editing system for the treatment of OA comprises one or more sgRNAs targeting exon 2 of eIL1RAP. In some embodiments, the CRISPR gene-editing system for the treatment of OA comprises one or more sgRNAs targeting exon 3 of eIL1RAP. In some embodiments, the CRISPR gene-editing system for the treatment of OA comprises one or more sgRNAs targeting exon 4 of eIL1RAP. In some embodiments, the CRISPR gene-editing system for the treatment of OA comprises one or more sgRNAs targeting exon 5 of eIL1RAP. In some embodiments, the CRISPR gene-editing system for the treatment of OA comprises one or more sgRNAs targeting exon 6 of eIL1RAP. In some embodiments, the CRISPR gene-editing system for the treatment of OA comprises one or more sgRNAs targeting exon 7 of eIL1RAP. In some embodiments, the CRISPR gene-editing system for the treatment of OA comprises one or more sgRNAs targeting exon 8 of eIL1RAP. In some embodiments, the CRISPR gene-editing system for the treatment of OA comprises one or more sgRNAs targeting exon 9 of eIL1RAP. In some embodiments, the CRISPR gene-editing system for the treatment of OA comprises one or more sgRNAs targeting exon 10 of eIL1RAP. In some embodiments, the CRISPR gene-editing system for the treatment of OA comprises one or more sgRNAs targeting exon 11 of eIL1RAP. In some embodiments, the CRISPR gene-editing system for the treatment of OA comprises one or more sgRNAs targeting exon 12 of eIL1RAP. In some embodiments, the CRISPR gene-editing system for the treatment of OA comprises one or more sgRNAs targeting exon 13 of eIL1RAP. In some embodiments, the CRISPR gene-editing system for the treatment of OA comprising one or more sgRNAs targeting an exon of eIL1RAP is delivered via one or more lipid nanoparticles (LNPs), the LNPs comprising an LNP system described herein, e.g., and without limitation, any one of LNP systems LNP001 to LNP240.

[0287] In some embodiments, the CRISPR gene-editing system for the treatment of OA comprises one or more sgRNAs targeting exon 1 of fIL1RAP. In some embodiments, the CRISPR gene-editing system for the treatment of OA comprises one or more sgRNAs targeting exon 2 of fIL1RAP. In some embodiments, the CRISPR gene-editing system for the treatment of OA comprises one or more sgRNAs targeting exon 3 of fIL1RAP. In some embodiments, the CRISPR gene-editing system for the treatment of OA comprises one or more sgRNAs targeting exon 4 of fIL1RAP. In some embodiments, the CRISPR gene-editing system for the treatment of OA comprises one or more sgRNAs targeting exon 5 of fIL1RAP. In some embodiments, the CRISPR gene-editing system for the treatment of OA comprises one or more sgRNAs targeting exon 6 of fIL1RAP. In some embodiments, the CRISPR gene-editing system for the treatment of OA comprises one or more sgRNAs targeting exon 7 of fIL1RAP. In some embodiments, the CRISPR gene-editing system for the treatment of OA comprises one or more sgRNAs targeting exon 8 of fIL1RAP. In some embodiments, the CRISPR gene-editing system for the treatment of OA comprises one or more sgRNAs targeting exon 9 of fIL1RAP. In some embodiments, the CRISPR gene-editing system for the treatment of OA comprises one or more sgRNAs targeting exon 10 of fIL1RAP. In some embodiments, the CRISPR gene-editing system for the treatment of OA comprises one or more sgRNAs targeting exon 11 of fIL1RAP. In some embodiments, the CRISPR gene-editing system for the treatment of OA comprises one or more sgRNAs targeting exon 12 of fIL1RAP. In some embodiments, the CRISPR gene-editing system for the treatment of OA comprises one or more sgRNAs targeting exon 13 of fIL1RAP. In some embodiments, the CRISPR gene-editing system for the treatment of OA comprises one or more sgRNAs targeting exon 14 of fIL1RAP. In some embodiments, the CRISPR gene-editing system for the treatment of OA comprising one or more sgRNAs targeting an exon of fIL1RAP is delivered via one or more lipid nanoparticles (LNPs), the LNPs comprising an LNP system described herein, e.g., and without limitation, any one of LNP systems LNP001 to LNP240.

[0288] In some embodiments, the CRISPR gene-editing system for the treatment of OA comprises one or more sgRNAs targeting TGFBR1. In some embodiments, the CRISPR gene-editing system for the treatment of OA comprises one or more sgRNAs targeting hTGFBR1. In some embodiments, the CRISPR gene-editing system for the treatment of OA comprises one or more sgRNAs targeting cTGFBR1. In some embodiments, the CRISPR gene-editing system for the treatment of OA comprises one or more sgRNAs targeting e TGFBR1. In some embodiments, the CRISPR gene-editing system for the treatment of OA comprises one or more sgRNAs targeting fTGFBR1. In some embodiments, the CRISPR gene-editing system for the treatment of OA comprising one or more sgRNAs targeting an exon of TGFBR1 is delivered via one or more lipid nanoparticles (LNPs), the LNPs comprising an LNP system described herein, e.g., and without limitation, any one of LNP systems LNP001 to LNP240.

[0289] In some embodiments, the CRISPR gene-editing system for the treatment of OA comprises one or more sgRNAs targeting exon 1 of hTGFBR1. In some embodiments, the CRISPR gene-editing system for the treatment of OA comprises one or more sgRNAs targeting exon 2 of hTGFBR1. In some embodiments, the CRISPR gene-editing system for the treatment of OA comprises one or more sgRNAs targeting exon 3 of hTGFBR1. In some embodiments, the CRISPR gene-editing system for the treatment of OA comprises one or more sgRNAs targeting exon 4 of hTGFBR1. In some embodiments, the CRISPR gene-editing system for the treatment of OA comprises one or more sgRNAs targeting exon 5 of hTGFBR1. In some embodiments, the CRISPR gene-editing system for the treatment of OA comprises one or more sgRNAs targeting exon 6 of hTGFBR1. In some embodiments, the CRISPR gene-editing system for the treatment of OA comprises one or more sgRNAs targeting exon 7 of hTGFBR1. In some embodiments, the CRISPR gene-editing system for the treatment of OA comprises one or more sgRNAs targeting exon 8 of hTGFBR1. In some embodiments, the CRISPR gene-editing system for the treatment of OA comprises one or more sgRNAs targeting exon 9 of hTGFBR1. In some embodiments, the CRISPR gene-editing system for the treatment of OA comprises one or more sgRNAs targeting exon 10 of hTGFBR1. In some embodiments, the CRISPR gene-editing system for the treatment of OA comprises one or more sgRNAs targeting exon 11 of hTGFBR1. In some embodiments, the CRISPR gene-editing system for the treatment of OA comprising one or more sgRNAs targeting an exon of hTGFBR1 is delivered via one or more lipid nanoparticles (LNPs), the LNPs comprising an LNP system described herein, e.g., and without limitation, any one of LNP systems LNP001 to LNP240.

[0290] In some embodiments, the CRISPR gene-editing system for the treatment of OA comprises one or more sgRNAs targeting exon 1 of cTGFBR1. In some embodiments, the CRISPR gene-editing system for the treatment of OA comprises one or more sgRNAs targeting exon 2 of cTGFBR1. In some embodiments, the CRISPR gene-editing system for the treatment of OA comprises one or more sgRNAs targeting exon 3 of cTGFBR1. In some embodiments, the CRISPR gene-editing system for the treatment of OA comprises one or more sgRNAs targeting exon 4 of cTGFBR1. In some embodiments, the CRISPR gene-editing system for the treatment of OA comprises one or more sgRNAs targeting exon 5 of cTGFBR1. In some embodiments, the CRISPR gene-editing system for the treatment of OA comprises one or more sgRNAs targeting exon 6 of cTGFBR1. In some embodiments, the CRISPR gene-editing system for the treatment of OA comprises one or more sgRNAs targeting exon 7 of cTGFBR1. In some embodiments, the CRISPR gene-editing system for the treatment of OA comprises one or more sgRNAs targeting exon 8 of cTGFBR1. In some embodiments, the CRISPR gene-editing system for the treatment of OA comprises one or more sgRNAs targeting exon 9 of cTGFBR1. In some embodiments, the CRISPR gene-editing system for the treatment of OA comprising one or more sgRNAs targeting an exon of cTGFBR1 is delivered via one or more lipid nanoparticles (LNPs), the LNPs comprising an LNP system described herein, e.g., and without limitation, any one of LNP systems LNP001 to LNP240.

[0291] In some embodiments, the CRISPR gene-editing system for the treatment of OA comprises one or more sgRNAs targeting exon 1 of eTGFBR1. In some embodiments, the CRISPR gene-editing system for the treatment of OA comprises one or more sgRNAs targeting exon 2 of eTGFBR1. In some embodiments, the CRISPR gene-editing system for the treatment of OA comprises one or more sgRNAs targeting exon 3 of eTGFBR1. In some embodiments, the CRISPR gene-editing system for the treatment of OA comprises one or more sgRNAs targeting exon 4 of eTGFBR1. In some embodiments, the CRISPR gene-editing system for the treatment of OA comprises one or more sgRNAs targeting exon 5 of eTGFBR1. In some embodiments, the CRISPR gene-editing system for the treatment of OA comprises one or more sgRNAs targeting exon 6 of eTGFBR1. In some embodiments, the CRISPR gene-editing system for the treatment of OA comprises one or more sgRNAs targeting exon 7 of eTGFBR1. In some embodiments, the CRISPR gene-editing system for the treatment of OA comprises one or more sgRNAs targeting exon 8 of eTGFBR1. In some embodiments, the CRISPR gene-editing system for the treatment of OA comprises one or more sgRNAs targeting exon 9 of eTGFBR1. In some embodiments, the CRISPR gene-editing system for the treatment of OA comprises one or more sgRNAs targeting exon 10 of eTGFBR1. In some embodiments, the CRISPR gene-editing system for the treatment of OA comprises one or more sgRNAs targeting exon 11 of eTGFBR1. In some embodiments, the CRISPR gene-editing system for the treatment of OA comprises one or more sgRNAs targeting exon 12 of eTGFBR1. In some embodiments, the CRISPR gene-editing system for the treatment of OA comprising one or more sgRNAs targeting an exon of eTGFBR1 is delivered via one or more lipid nanoparticles (LNPs), the LNPs comprising an LNP system described herein, e.g., and without limitation, any one of LNP systems LNP001 to LNP240.

[0292] In some embodiments, the CRISPR gene-editing system for the treatment of OA comprises one or more sgRNAs targeting exon 1 of fTGFBR1. In some embodiments, the CRISPR gene-editing system for the treatment of OA comprises one or more sgRNAs targeting exon 2 of fTGFBR1. In some embodiments, the CRISPR gene-editing system for the treatment of OA comprises one or more sgRNAs targeting exon 3 of fTGFBR1. In some embodiments, the CRISPR gene-editing system for the treatment of OA comprises one or more sgRNAs targeting exon 4 of fTGFBR1. In some embodiments, the CRISPR gene-editing system for the treatment of OA comprises one or more sgRNAs targeting exon 5 of fTGFBR1. In some embodiments, the CRISPR gene-editing system for the treatment of OA comprises one or more sgRNAs targeting exon 6 of fTGFBR1. In some embodiments, the CRISPR gene-editing system for the treatment of OA comprises one or more sgRNAs targeting exon 7 of fTGFBR1. In some embodiments, the CRISPR gene-editing system for the treatment of OA comprises one or more sgRNAs targeting exon 8 of fTGFBR1. In some embodiments, the CRISPR gene-editing system for the treatment of OA comprises one or more sgRNAs targeting exon 9 of fTGFBR1. In some embodiments, the CRISPR gene-editing system for the treatment of OA comprises one or more sgRNAs targeting exon 10 of fTGFBR1. In some embodiments, the CRISPR gene-editing system for the treatment of OA comprises one or more sgRNAs targeting exon 11 of fTGFBR1. In some embodiments, the CRISPR gene-editing system for the treatment of OA comprising one or more sgRNAs targeting an exon of fTGFBR1 is delivered via one or more lipid nanoparticles (LNPs), the LNPs comprising an LNP system described herein, e.g., and without limitation, any one of LNP systems LNP001 to LNP240.

[0293] In some embodiments, the CRISPR gene-editing system for the treatment of OA comprises one or more sgRNAs targeting TGFBR2. In some embodiments, the CRISPR gene-editing system for the treatment of OA comprises one or more sgRNAs targeting hTGFBR2. In some embodiments, the CRISPR gene-editing system for the treatment of OA comprises one or more sgRNAs targeting cTGFBR2. In some embodiments, the CRISPR gene-editing system for the treatment of OA comprises one or more sgRNAs targeting eTGFBR2. In some embodiments, the CRISPR gene-editing system for the treatment of OA comprises one or more sgRNAs targeting fTGFBR2. In some embodiments, the CRISPR gene-editing system for the treatment of OA comprising one or more sgRNAs targeting an exon of TGFBR2 is delivered via one or more lipid nanoparticles (LNPs), the LNPs comprising an LNP system described herein, e.g., and without limitation, any one of LNP systems LNP001 to LNP240.

[0294] In some embodiments, the CRISPR gene-editing system for the treatment of OA comprises one or more sgRNAs targeting exon 1 of hTGFBR2. In some embodiments, the CRISPR gene-editing system for the treatment of OA comprises one or more sgRNAs targeting exon 2 of hTGFBR2. In some embodiments, the CRISPR gene-editing system for the treatment of OA comprises one or more sgRNAs targeting exon 3 of hTGFBR2. In some embodiments, the CRISPR gene-editing system for the treatment of OA comprises one or more sgRNAs targeting exon 4 of hTGFBR2. In some embodiments, the CRISPR gene-editing system for the treatment of OA comprises one or more sgRNAs targeting exon 5 of hTGFBR2. In some embodiments, the CRISPR gene-editing system for the treatment of OA comprises one or more sgRNAs targeting exon 6 of hTGFBR2. In some embodiments, the CRISPR gene-editing system for the treatment of OA comprises one or more sgRNAs targeting exon 7 of hTGFBR2. In some embodiments, the CRISPR gene-editing system for the treatment of OA comprises one or more sgRNAs targeting exon 8 of hTGFBR2. In some embodiments, the CRISPR gene-editing system for the treatment of OA comprises one or more sgRNAs targeting exon 9 of hTGFBR2. In some embodiments, the CRISPR gene-editing system for the treatment of OA comprising one or more sgRNAs targeting an exon of hTGFBR2 is delivered via one or more lipid nanoparticles (LNPs), the LNPs comprising an LNP system described herein, e.g., and without limitation, any one of LNP systems LNP001 to LNP240.

[0295] In some embodiments, the CRISPR gene-editing system for the treatment of OA comprises one or more sgRNAs targeting exon 1 of cTGFBR2. In some embodiments, the CRISPR gene-editing system for the treatment of OA comprises one or more sgRNAs targeting exon 2 of cTGFBR2. In some embodiments, the CRISPR gene-editing system for the treatment of OA comprises one or more sgRNAs targeting exon 3 of cTGFBR2. In some embodiments, the CRISPR gene-editing system for the treatment of OA comprises one or more sgRNAs targeting exon 4 of cTGFBR2. In some embodiments, the CRISPR gene-editing system for the treatment of OA comprises one or more sgRNAs targeting exon 5 of cTGFBR2. In some embodiments, the CRISPR gene-editing system for the treatment of OA comprises one or more sgRNAs targeting exon 6 of cTGFBR2. In some embodiments, the CRISPR gene-editing system for the treatment of OA comprises one or more sgRNAs targeting exon 7 of cTGFBR2. In some embodiments, the CRISPR gene-editing system for the treatment of OA comprises one or more sgRNAs targeting exon 8 of cTGFBR2. In some embodiments, the CRISPR gene-editing system for the treatment of OA comprising one or more sgRNAs targeting an exon of cTGFBR2 is delivered via one or more lipid nanoparticles (LNPs), the LNPs comprising an LNP system described herein, e.g., and without limitation, any one of LNP systems LNP001 to LNP240.

[0296] In some embodiments, the CRISPR gene-editing system for the treatment of OA comprises one or more sgRNAs targeting exon 1 of eTGFBR2. In some embodiments, the CRISPR gene-editing system for the treatment of OA comprises one or more sgRNAs targeting exon 2 of eTGFBR2. In some embodiments, the CRISPR gene-editing system for the treatment of OA comprises one or more sgRNAs targeting exon 3 of eTGFBR2. In some embodiments, the CRISPR gene-editing system for the treatment of OA comprises one or more sgRNAs targeting exon 4 of eTGFBR2. In some embodiments, the CRISPR gene-editing system for the treatment of OA comprises one or more sgRNAs targeting exon 5 of eTGFBR2. In some embodiments, the CRISPR gene-editing system for the treatment of OA comprises one or more sgRNAs targeting exon 6 of eTGFBR2. In some embodiments, the CRISPR gene-editing system for the treatment of OA comprises one or more sgRNAs targeting exon 7 of eTGFBR2. In some embodiments, the CRISPR gene-editing system for the treatment of OA comprises one or more sgRNAs targeting exon 8 of eTGFBR2. In some embodiments, the CRISPR gene-editing system for the treatment of OA comprises one or more sgRNAs targeting exon 9 of eTGFBR2. In some embodiments, the CRISPR gene-editing system for the treatment of OA comprises one or more sgRNAs targeting exon 10 of eTGFBR2. In some embodiments, the CRISPR gene-editing system for the treatment of OA comprising one or more sgRNAs targeting an exon of eTGFBR2 is delivered via one or more lipid nanoparticles (LNPs), the LNPs comprising an LNP system described herein, e.g., and without limitation, any one of LNP systems LNP001 to LNP240.

[0297] In some embodiments, the CRISPR gene-editing system for the treatment of OA comprises one or more sgRNAs targeting exon 1 of fTGFBR2. In some embodiments, the CRISPR gene-editing system for the treatment of OA comprises one or more sgRNAs targeting exon 2 of fTGFBR2. In some embodiments, the CRISPR gene-editing system for the treatment of OA comprises one or more sgRNAs targeting exon 3 of fTGFBR2. In some embodiments, the CRISPR gene-editing system for the treatment of OA comprises one or more sgRNAs targeting exon 4 of fTGFBR2. In some embodiments, the CRISPR gene-editing system for the treatment of OA comprises one or more sgRNAs targeting exon 5 of fTGFBR2. In some embodiments, the CRISPR gene-editing system for the treatment of OA comprises one or more sgRNAs targeting exon 6 of fTGFBR2. In some embodiments, the CRISPR gene-editing system for the treatment of OA comprises one or more sgRNAs targeting exon 7 of fTGFBR2. In some embodiments, the CRISPR gene-editing system for the treatment of OA comprises one or more sgRNAs targeting exon 8 of fTGFBR2. In some embodiments, the CRISPR gene-editing system for the treatment of OA comprising one or more sgRNAs targeting an exon of fTGFBR2 is delivered via one or more lipid nanoparticles (LNPs), the LNPs comprising an LNP system described herein, e.g., and without limitation, any one of LNP systems LNP001 to LNP240.

[0298] In some embodiments, the CRISPR gene-editing system for the treatment of OA comprises one or more sgRNAs targeting IL6R. In some embodiments, the CRISPR gene-editing system for the treatment of OA comprises one or more sgRNAs targeting hIL6R. In some embodiments, the CRISPR gene-editing system for the treatment of OA comprises one or more sgRNAs targeting cIL6R. In some embodiments, the CRISPR gene-editing system for the treatment of OA comprises one or more sgRNAs targeting eIL6R. In some embodiments, the CRISPR gene-editing system for the treatment of OA comprises one or more sgRNAs targeting fIL6R. In some embodiments, the CRISPR gene-editing system for the treatment of OA comprising one or more sgRNAs targeting an exon of IL6R is delivered via one or more lipid nanoparticles (LNPs), the LNPs comprising an LNP system described herein, e.g., and without limitation, any one of LNP systems LNP001 to LNP240.

[0299] In some embodiments, the CRISPR gene-editing system for the treatment of OA comprises one or more sgRNAs targeting exon 1 of hIL6R. In some embodiments, the CRISPR gene-editing system for the treatment of OA comprises one or more sgRNAs targeting exon 2 of hIL6R. In some embodiments, the CRISPR gene-editing system for the treatment of OA comprises one or more sgRNAs targeting exon 3 of hIL6R. In some embodiments, the CRISPR gene-editing system for the treatment of OA comprises one or more sgRNAs targeting exon 4 of hIL6R. In some embodiments, the CRISPR gene-editing system for the treatment of OA comprises one or more sgRNAs targeting exon 5 of hIL6R. In some embodiments, the CRISPR gene-editing system for the treatment of OA comprises one or more sgRNAs targeting exon 6 of hIL6R. In some embodiments, the CRISPR gene-editing system for the treatment of OA comprises one or more sgRNAs targeting exon 7 of hIL6R. In some embodiments, the CRISPR gene-editing system for the treatment of OA comprises one or more sgRNAs targeting exon 8 of hIL6R. In some embodiments, the CRISPR gene-editing system for the treatment of OA comprises one or more sgRNAs targeting exon 9 of hIL6R. In some embodiments, the CRISPR gene-editing system for the treatment of OA comprises one or more sgRNAs targeting exon 10 of hIL6R. In some embodiments, the CRISPR gene-editing system for the treatment of OA comprises one or more sgRNAs targeting exon 11 of hIL6R In some embodiments, the CRISPR gene-editing system for the treatment of OA comprises one or more sgRNAs targeting exon 12 of hIL6R. In some embodiments, the CRISPR gene-editing system for the treatment of OA comprises one or more sgRNAs targeting exon 13 of hIL6R. In some embodiments, the CRISPR gene-editing system for the treatment of OA comprises one or more sgRNAs targeting exon 14 of hIL6R. In some embodiments, the CRISPR gene-editing system for the treatment of OA comprises one or more sgRNAs targeting exon 15 of hIL6R. In some embodiments, the CRISPR gene-editing system for the treatment of OA comprising one or more sgRNAs targeting an exon of hIL6R is delivered via one or more lipid nanoparticles (LNPs), the LNPs comprising an LNP system described herein, e.g., and without limitation, any one of LNP systems LNP001 to LNP240.

[0300] In some embodiments, the CRISPR gene-editing system for the treatment of OA comprises one or more sgRNAs targeting exon 1 of cIL6R. In some embodiments, the CRISPR gene-editing system for the treatment of OA comprises one or more sgRNAs targeting exon 2 of cIL6R. In some embodiments, the CRISPR gene-editing system for the treatment of OA comprises one or more sgRNAs targeting exon 3 of cIL6R. In some embodiments, the CRISPR gene-editing system for the treatment of OA comprises one or more sgRNAs targeting exon 4 of cIL6R. In some embodiments, the CRISPR gene-editing system for the treatment of OA comprises one or more sgRNAs targeting exon 5 of cIL6R. In some embodiments, the CRISPR gene-editing system for the treatment of OA comprises one or more sgRNAs targeting exon 6 of cIL6R. In some embodiments, the CRISPR gene-editing system for the treatment of OA comprises one or more sgRNAs targeting exon 7 of cIL6R. In some embodiments, the CRISPR gene-editing system for the treatment of OA comprises one or more sgRNAs targeting exon 8 of cIL6R. In some embodiments, the CRISPR gene-editing system for the treatment of OA comprises one or more sgRNAs targeting exon 9 of cIL6R. In some embodiments, the CRISPR gene-editing system for the treatment of OA comprises one or more sgRNAs targeting exon 10 of cIL6R. In some embodiments, the CRISPR gene-editing system for the treatment of OA comprises one or more sgRNAs targeting exon 11 of cIL6R. In some embodiments, the CRISPR gene-editing system for the treatment of OA comprises one or more sgRNAs targeting exon 12 of cIL6R. In some embodiments, the CRISPR gene-editing system for the treatment of OA comprises one or more sgRNAs targeting exon 13 of cIL6R. In some embodiments, the CRISPR gene-editing system for the treatment of OA comprising one or more sgRNAs targeting an exon of cIL6R is delivered via one or more lipid nanoparticles (LNPs), the LNPs comprising an LNP system described herein, e.g., and without limitation, any one of LNP systems LNP001 to LNP240.

[0301] In some embodiments, the CRISPR gene-editing system for the treatment of OA comprises one or more sgRNAs targeting exon 1 of eIL6R. In some embodiments, the CRISPR gene-editing system for the treatment of OA comprises one or more sgRNAs targeting exon 2 of eIL6R. In some embodiments, the CRISPR gene-editing system for the treatment of OA comprises one or more sgRNAs targeting exon 3 of eIL6R. In some embodiments, the CRISPR gene-editing system for the treatment of OA comprises one or more sgRNAs targeting exon 4 of eIL6R. In some embodiments, the CRISPR gene-editing system for the treatment of OA comprises one or more sgRNAs targeting exon 5 of eIL6R. In some embodiments, the CRISPR gene-editing system for the treatment of OA comprises one or more sgRNAs targeting exon 6 of eIL6R. In some embodiments, the CRISPR gene-editing system for the treatment of OA comprises one or more sgRNAs targeting exon 7 of eIL6R. In some embodiments, the CRISPR gene-editing system for the treatment of OA comprises one or more sgRNAs targeting exon 8 of eIL6R. In some embodiments, the CRISPR gene-editing system for the treatment of OA comprises one or more sgRNAs targeting exon 9 of eIL6R. In some embodiments, the CRISPR gene-editing system for the treatment of OA comprises one or more sgRNAs targeting exon 10 of eIL6R. In some embodiments, the CRISPR gene-editing system for the treatment of OA comprises one or more sgRNAs targeting exon 11 of eIL6R. In some embodiments, the CRISPR gene-editing system for the treatment of OA comprising one or more sgRNAs targeting an exon of eIL6R is delivered via one or more lipid nanoparticles (LNPs), the LNPs comprising an LNP system described herein, e.g., and without limitation, any one of LNP systems LNP001 to LNP240.

[0302] In some embodiments, the CRISPR gene-editing system for the treatment of OA comprises one or more sgRNAs targeting exon 1 of fIL6R. In some embodiments, the CRISPR gene-editing system for the treatment of OA comprises one or more sgRNAs targeting exon 2 of fIL6R. In some embodiments, the CRISPR gene-editing system for the treatment of OA comprises one or more sgRNAs targeting exon 3 of fIL6R. In some embodiments, the CRISPR gene-editing system for the treatment of OA comprises one or more sgRNAs targeting exon 4 of fIL6R. In some embodiments, the CRISPR gene-editing system for the treatment of OA comprises one or more sgRNAs targeting exon 5 of fIL6R. In some embodiments, the CRISPR gene-editing system for the treatment of OA comprises one or more sgRNAs targeting exon 6 of fIL6R. In some embodiments, the CRISPR gene-editing system for the treatment of OA comprises one or more sgRNAs targeting exon 7 of fIL6R. In some embodiments, the CRISPR gene-editing system for the treatment of OA comprises one or more sgRNAs targeting exon 8 of fIL6R. In some embodiments, the CRISPR gene-editing system for the treatment of OA comprises one or more sgRNAs targeting exon 9 of fIL6R. In some embodiments, the CRISPR gene-editing system for the treatment of OA comprises one or more sgRNAs targeting exon 10 of fIL6R. In some embodiments, the CRISPR gene-editing system for the treatment of OA comprising one or more sgRNAs targeting an exon of fIL6R is delivered via one or more lipid nanoparticles (LNPs), the LNPs comprising an LNP system described herein, e.g., and without limitation, any one of LNP systems LNP001 to LNP240.

[0303] In some embodiments, the CRISPR gene-editing system for the treatment of OA comprises one or more sgRNAs targeting IL6ST. In some embodiments, the CRISPR gene-editing system for the treatment of OA comprises one or more sgRNAs targeting hIL6ST. In some embodiments, the CRISPR gene-editing system for the treatment of OA comprises one or more sgRNAs targeting cIL6ST. In some embodiments, the CRISPR gene-editing system for the treatment of OA comprises one or more sgRNAs targeting eIL6ST. In some embodiments, the CRISPR gene-editing system for the treatment of OA comprises one or more sgRNAs targeting fIL6ST. In some embodiments, the CRISPR gene-editing system for the treatment of OA comprising one or more sgRNAs targeting an exon of IL6ST is delivered via one or more lipid nanoparticles (LNPs), the LNPs comprising an LNP system described herein, e.g., and without limitation, any one of LNP systems LNP001 to LNP240.

[0304] In some embodiments, the CRISPR gene-editing system for the treatment of OA comprises one or more sgRNAs targeting exon 1 of hIL6ST. In some embodiments, the CRISPR gene-editing system for the treatment of OA comprises one or more sgRNAs targeting exon 2 of hIL6ST. In some embodiments, the CRISPR gene-editing system for the treatment of OA comprises one or more sgRNAs targeting exon 3 of hIL6ST. In some embodiments, the CRISPR gene-editing system for the treatment of OA comprises one or more sgRNAs targeting exon 4 of hIL6ST. In some embodiments, the CRISPR gene-editing system for the treatment of OA comprises one or more sgRNAs targeting exon 5 of hIL6ST. In some embodiments, the CRISPR gene-editing system for the treatment of OA comprises one or more sgRNAs targeting exon 6 of hIL6ST. In some embodiments, the CRISPR gene-editing system for the treatment of OA comprises one or more sgRNAs targeting exon 7 of hIL6ST. In some embodiments, the CRISPR gene-editing system for the treatment of OA comprises one or more sgRNAs targeting exon 8 of hIL6ST. In some embodiments, the CRISPR gene-editing system for the treatment of OA comprises one or more sgRNAs targeting exon 9 of hIL6ST. In some embodiments, the CRISPR gene-editing system for the treatment of OA comprises one or more sgRNAs targeting exon 10 of hIL6ST. In some embodiments, the CRISPR gene-editing system for the treatment of OA comprises one or more sgRNAs targeting exon 11 of hIL6ST. In some embodiments, the CRISPR gene-editing system for the treatment of OA comprises one or more sgRNAs targeting exon 12 of hIL6ST. In some embodiments, the CRISPR gene-editing system for the treatment of OA comprises one or more sgRNAs targeting exon 13 of hIL6ST. In some embodiments, the CRISPR gene-editing system for the treatment of OA comprises one or more sgRNAs targeting exon 14 of hIL6ST. In some embodiments, the CRISPR gene-editing system for the treatment of OA comprises one or more sgRNAs targeting exon 15 of hIL6ST. In some embodiments, the CRISPR gene-editing system for the treatment of OA comprises one or more sgRNAs targeting exon 16 of hIL6ST. In some embodiments, the CRISPR gene-editing system for the treatment of OA comprises one or more sgRNAs targeting exon 17 of hIL6ST. In some embodiments, the CRISPR gene-editing system for the treatment of OA comprises one or more sgRNAs targeting exon 18 of hIL6ST. In some embodiments, the CRISPR gene-editing system for the treatment of OA comprises one or more sgRNAs targeting exon 19 of hIL6ST. In some embodiments, the CRISPR gene-editing system for the treatment of OA comprising one or more sgRNAs targeting an exon of hIL6ST is delivered via one or more lipid nanoparticles (LNPs), the LNPs comprising an LNP system described herein, e.g., and without limitation, any one of LNP systems LNP001 to LNP240.

[0305] In some embodiments, the CRISPR gene-editing system for the treatment of OA comprises one or more sgRNAs targeting exon 1 of cIL6ST. In some embodiments, the CRISPR gene-editing system for the treatment of OA comprises one or more sgRNAs targeting exon 2 of cIL6ST. In some embodiments, the CRISPR gene-editing system for the treatment of OA comprises one or more sgRNAs targeting exon 3 of cIL6ST. In some embodiments, the CRISPR gene-editing system for the treatment of OA comprises one or more sgRNAs targeting exon 4 of cIL6ST. In some embodiments, the CRISPR gene-editing system for the treatment of OA comprises one or more sgRNAs targeting exon 5 of cIL6ST. In some embodiments, the CRISPR gene-editing system for the treatment of OA comprises one or more sgRNAs targeting exon 6 of cIL6ST. In some embodiments, the CRISPR gene-editing system for the treatment of OA comprises one or more sgRNAs targeting exon 7 of cIL6ST. In some embodiments, the CRISPR gene-editing system for the treatment of OA comprises one or more sgRNAs targeting exon 8 of cIL6ST. In some embodiments, the CRISPR gene-editing system for the treatment of OA comprises one or more sgRNAs targeting exon 9 of cIL6ST. In some embodiments, the CRISPR gene-editing system for the treatment of OA comprises one or more sgRNAs targeting exon 10 of cIL6ST. In some embodiments, the CRISPR gene-editing system for the treatment of OA comprises one or more sgRNAs targeting exon 11 of cIL6ST In some embodiments, the CRISPR gene-editing system for the treatment of OA comprises one or more sgRNAs targeting exon 12 of cIL6ST. In some embodiments, the CRISPR gene-editing system for the treatment of OA comprises one or more sgRNAs targeting exon 13 of cIL6ST. In some embodiments, the CRISPR gene-editing system for the treatment of OA comprises one or more sgRNAs targeting exon 14 of cIL6ST. In some embodiments, the CRISPR gene-editing system for the treatment of OA comprises one or more sgRNAs targeting exon 15 of cIL6ST. In some embodiments, the CRISPR gene-editing system for the treatment of OA comprises one or more sgRNAs targeting exon 16 of cIL6ST. In some embodiments, the CRISPR gene-editing system for the treatment of OA comprises one or more sgRNAs targeting exon 17 of cIL6ST. In some embodiments, the CRISPR gene-editing system for the treatment of OA comprises one or more sgRNAs targeting exon 18 of cIL6ST. In some embodiments, the CRISPR gene-editing system for the treatment of OA comprising one or more sgRNAs targeting an exon of cIL6ST is delivered via one or more lipid nanoparticles (LNPs), the LNPs comprising an LNP system described herein, e.g., and without limitation, any one of LNP systems LNP001 to LNP240.

[0306] In some embodiments, the CRISPR gene-editing system for the treatment of OA comprises one or more sgRNAs targeting exon 1 of eIL6ST. In some embodiments, the CRISPR gene-editing system for the treatment of OA comprises one or more sgRNAs targeting exon 2 of eIL6ST. In some embodiments, the CRISPR gene-editing system for the treatment of OA comprises one or more sgRNAs targeting exon 3 of eIL6ST. In some embodiments, the CRISPR gene-editing system for the treatment of OA comprises one or more sgRNAs targeting exon 4 of eIL6ST. In some embodiments, the CRISPR gene-editing system for the treatment of OA comprises one or more sgRNAs targeting exon 5 of eIL6ST. In some embodiments, the CRISPR gene-editing system for the treatment of OA comprises one or more sgRNAs targeting exon 6 of eIL6ST. In some embodiments, the CRISPR gene-editing system for the treatment of OA comprises one or more sgRNAs targeting exon 7 of eIL6ST. In some embodiments, the CRISPR gene-editing system for the treatment of OA comprises one or more sgRNAs targeting exon 8 of eIL6ST. In some embodiments, the CRISPR gene-editing system for the treatment of OA comprises one or more sgRNAs targeting exon 9 of eIL6ST. In some embodiments, the CRISPR gene-editing system for the treatment of OA comprises one or more sgRNAs targeting exon 10 of eIL6ST. In some embodiments, the CRISPR gene-editing system for the treatment of OA comprises one or more sgRNAs targeting exon 11 of eIL6ST In some embodiments, the CRISPR gene-editing system for the treatment of OA comprises one or more sgRNAs targeting exon 12 of eIL6ST. In some embodiments, the CRISPR gene-editing system for the treatment of OA comprises one or more sgRNAs targeting exon 13 of eIL6ST. In some embodiments, the CRISPR gene-editing system for the treatment of OA comprises one or more sgRNAs targeting exon 14 of eIL6ST. In some embodiments, the CRISPR gene-editing system for the treatment of OA comprises one or more sgRNAs targeting exon 15 of eIL6ST. In some embodiments, the CRISPR gene-editing system for the treatment of OA comprises one or more sgRNAs targeting exon 16 of eIL6ST. In some embodiments, the CRISPR gene-editing system for the treatment of OA comprises one or more sgRNAs targeting exon 17 of eIL6ST. In some embodiments, the CRISPR gene-editing system for the treatment of OA comprises one or more sgRNAs targeting exon 18 of eIL6ST. In some embodiments, the CRISPR gene-editing system for the treatment of OA comprising one or more sgRNAs targeting an exon of eIL6ST is delivered via one or more lipid nanoparticles (LNPs), the LNPs comprising an LNP system described herein, e.g., and without limitation, any one of LNP systems LNP001 to LNP240.

[0307] In some embodiments, the CRISPR gene-editing system for the treatment of OA comprises one or more sgRNAs targeting exon 1 of fIL6ST. In some embodiments, the CRISPR gene-editing system for the treatment of OA comprises one or more sgRNAs targeting exon 2 of fIL6ST. In some embodiments, the CRISPR gene-editing system for the treatment of OA comprises one or more sgRNAs targeting exon 3 of fIL6ST. In some embodiments, the CRISPR gene-editing system for the treatment of OA comprises one or more sgRNAs targeting exon 4 of fIL6ST. In some embodiments, the CRISPR gene-editing system for the treatment of OA comprises one or more sgRNAs targeting exon 5 of fIL6ST. In some embodiments, the CRISPR gene-editing system for the treatment of OA comprises one or more sgRNAs targeting exon 6 of fIL6ST. In some embodiments, the CRISPR gene-editing system for the treatment of OA comprises one or more sgRNAs targeting exon 7 of fIL6ST. In some embodiments, the CRISPR gene-editing system for the treatment of OA comprises one or more sgRNAs targeting exon 8 of fIL6ST. In some embodiments, the CRISPR gene-editing system for the treatment of OA comprises one or more sgRNAs targeting exon 9 of fIL6ST. In some embodiments, the CRISPR gene-editing system for the treatment of OA comprises one or more sgRNAs targeting exon 10 of fIL6ST. In some embodiments, the CRISPR gene-editing system for the treatment of OA comprises one or more sgRNAs targeting exon 11 of fIL6ST. In some embodiments, the CRISPR gene-editing system for the treatment of OA comprises one or more sgRNAs targeting exon 12 of fIL6ST. In some embodiments, the CRISPR gene-editing system for the treatment of OA comprises one or more sgRNAs targeting exon 13 of fIL6ST. In some embodiments, the CRISPR gene-editing system for the treatment of OA comprises one or more sgRNAs targeting exon 14 of fIL6ST. In some embodiments, the CRISPR gene-editing system for the treatment of OA comprises one or more sgRNAs targeting exon 15 of fIL6ST. In some embodiments, the CRISPR gene-editing system for the treatment of OA comprises one or more sgRNAs targeting exon 16 of fIL6ST. In some embodiments, the CRISPR gene-editing system for the treatment of OA comprises one or more sgRNAs targeting exon 17 of fIL6ST. In some embodiments, the CRISPR gene-editing system for the treatment of OA comprises one or more sgRNAs targeting exon 18 of fIL6ST. In some embodiments, the CRISPR gene-editing system for the treatment of OA comprises one or more sgRNAs targeting exon 19 of fIL6ST. In some embodiments, the CRISPR gene-editing system for the treatment of OA comprises one or more sgRNAs targeting exon 20 of fIL6ST. In some embodiments, the CRISPR gene-editing system for the treatment of OA comprising one or more sgRNAs targeting an exon of fIL6ST is delivered via one or more lipid nanoparticles (LNPs), the LNPs comprising an LNP system described herein, e.g., and without limitation, any one of LNP systems LNP001 to LNP240.

[0308] In some embodiments, the CRISPR gene-editing system for the treatment of OA comprises one or more sgRNAs targeting TNFRSF1A. In some embodiments, the CRISPR gene-editing system for the treatment of OA comprises one or more sgRNAs targeting hTNFRSF1A. In some embodiments, the CRISPR gene-editing system for the treatment of OA comprises one or more sgRNAs targeting cTNFRSF1A. In some embodiments, the CRISPR gene-editing system for the treatment of OA comprises one or more sgRNAs targeting eTNFRSF1A. In some embodiments, the CRISPR gene-editing system for the treatment of OA comprises one or more sgRNAs targeting fTNFRSF1A. In some embodiments, the CRISPR gene-editing system for the treatment of OA comprising one or more sgRNAs targeting an exon of TNFRSF1A is delivered via one or more lipid nanoparticles (LNPs), the LNPs comprising an LNP system described herein, e.g., and without limitation, any one of LNP systems LNP001 to LNP240.

[0309] In some embodiments, the CRISPR gene-editing system for the treatment of OA comprises one or more sgRNAs targeting exon 1 of hTNFRSF1A. In some embodiments, the CRISPR gene-editing system for the treatment of OA comprises one or more sgRNAs targeting exon 2 of hTNFRSF1A. In some embodiments, the CRISPR gene-editing system for the treatment of OA comprises one or more sgRNAs targeting exon 3 of hTNFRSF1A. In some embodiments, the CRISPR gene-editing system for the treatment of OA comprises one or more sgRNAs targeting exon 4 of hTNFRSF1A. In some embodiments, the CRISPR gene-editing system for the treatment of OA comprises one or more sgRNAs targeting exon 5 of hTNFRSF1A. In some embodiments, the CRISPR gene-editing system for the treatment of OA comprises one or more sgRNAs targeting exon 6 of hTNFRSF1A. In some embodiments, the CRISPR gene-editing system for the treatment of OA comprises one or more sgRNAs targeting exon 7 of hTNFRSF1A. In some embodiments, the CRISPR gene-editing system for the treatment of OA comprises one or more sgRNAs targeting exon 8 of hTNFRSF1A. In some embodiments, the CRISPR gene-editing system for the treatment of OA comprises one or more sgRNAs targeting exon 9 of hTNFRSF1A. In some embodiments, the CRISPR gene-editing system for the treatment of OA comprises one or more sgRNAs targeting exon 10 of hTNFRSF1A. In some embodiments, the CRISPR gene-editing system for the treatment of OA comprises one or more sgRNAs targeting exon 11 of hTNFRSF1A. In some embodiments, the CRISPR gene-editing system for the treatment of OA comprising one or more sgRNAs targeting an exon of hTNFRSF1A is delivered via one or more lipid nanoparticles (LNPs), the LNPs comprising an LNP system described herein, e.g., and without limitation, any one of LNP systems LNP001 to LNP240.

[0310] In some embodiments, the CRISPR gene-editing system for the treatment of OA comprises one or more sgRNAs targeting exon 1 of cTNFRSF1A. In some embodiments, the CRISPR gene-editing system for the treatment of OA comprises one or more sgRNAs targeting exon 2 of cTNFRSF1A. In some embodiments, the CRISPR gene-editing system for the treatment of OA comprises one or more sgRNAs targeting exon 3 of cTNFRSF1A. In some embodiments, the CRISPR gene-editing system for the treatment of OA comprises one or more sgRNAs targeting exon 4 of cTNFRSF1A. In some embodiments, the CRISPR gene-editing system for the treatment of OA comprises one or more sgRNAs targeting exon 5 of cTNFRSF1A. In some embodiments, the CRISPR gene-editing system for the treatment of OA comprises one or more sgRNAs targeting exon 6 of cTNFRSF1A. In some embodiments, the CRISPR gene-editing system for the treatment of OA comprises one or more sgRNAs targeting exon 7 of cTNFRSF1A. In some embodiments, the CRISPR gene-editing system for the treatment of OA comprises one or more sgRNAs targeting exon 8 of cTNFRSF1A. In some embodiments, the CRISPR gene-editing system for the treatment of OA comprises one or more sgRNAs targeting exon 9 of cTNFRSF1A. In some embodiments, the CRISPR gene-editing system for the treatment of OA comprises one or more sgRNAs targeting exon 10 of cTNFRSF1A. In some embodiments, the CRISPR gene-editing system for the treatment of OA comprises one or more sgRNAs targeting exon 11 of cTNFRSF1A. In some embodiments, the CRISPR gene-editing system for the treatment of OA comprising one or more sgRNAs targeting an exon of cTNFRSF1A is delivered via one or more lipid nanoparticles (LNPs), the LNPs comprising an LNP system described herein, e.g., and without limitation, any one of LNP systems LNP001 to LNP240.

[0311] In some embodiments, the CRISPR gene-editing system for the treatment of OA comprises one or more sgRNAs targeting exon 1 of eTNFRSF1A. In some embodiments, the CRISPR gene-editing system for the treatment of OA comprises one or more sgRNAs targeting exon 2 of eTNFRSF1A. In some embodiments, the CRISPR gene-editing system for the treatment of OA comprises one or more sgRNAs targeting exon 3 of eTNFRSF1A. In some embodiments, the CRISPR gene-editing system for the treatment of OA comprises one or more sgRNAs targeting exon 4 of eTNFRSF1A. In some embodiments, the CRISPR gene-editing system for the treatment of OA comprises one or more sgRNAs targeting exon 5 of eTNFRSF1A. In some embodiments, the CRISPR gene-editing system for the treatment of OA comprises one or more sgRNAs targeting exon 6 of eTNFRSF1A. In some embodiments, the CRISPR gene-editing system for the treatment of OA comprises one or more sgRNAs targeting exon 7 of eTNFRSF1A. In some embodiments, the CRISPR gene-editing system for the treatment of OA comprises one or more sgRNAs targeting exon 8 of eTNFRSF1A. In some embodiments, the CRISPR gene-editing system for the treatment of OA comprises one or more sgRNAs targeting exon 9 of eTNFRSF1A. In some embodiments, the CRISPR gene-editing system for the treatment of OA comprises one or more sgRNAs targeting exon 10 of eTNFRSF1A. In some embodiments, the CRISPR gene-editing system for the treatment of OA comprising one or more sgRNAs targeting an exon of eTNFRSF1A is delivered via one or more lipid nanoparticles (LNPs), the LNPs comprising an LNP system described herein, e.g., and without limitation, any one of LNP systems LNP001 to LNP240.

[0312] In some embodiments, the CRISPR gene-editing system for the treatment of OA comprises one or more sgRNAs targeting exon 1 of fTNFRSF1A. In some embodiments, the CRISPR gene-editing system for the treatment of OA comprises one or more sgRNAs targeting exon 2 of fTNFRSF1A. In some embodiments, the CRISPR gene-editing system for the treatment of OA comprises one or more sgRNAs targeting exon 3 of fTNFRSF1A. In some embodiments, the CRISPR gene-editing system for the treatment of OA comprises one or more sgRNAs targeting exon 4 of fTNFRSF1A. In some embodiments, the CRISPR gene-editing system for the treatment of OA comprises one or more sgRNAs targeting exon 5 of fTNFRSF1A. In some embodiments, the CRISPR gene-editing system for the treatment of OA comprises one or more sgRNAs targeting exon 6 of fTNFRSF1A. In some embodiments, the CRISPR gene-editing system for the treatment of OA comprises one or more sgRNAs targeting exon 7 of fTNFRSF1A. In some embodiments, the CRISPR gene-editing system for the treatment of OA comprises one or more sgRNAs targeting exon 8 of fTNFRSF1A. In some embodiments, the CRISPR gene-editing system for the treatment of OA comprises one or more sgRNAs targeting exon 9 of fTNFRSF1A. In some embodiments, the CRISPR gene-editing system for the treatment of OA comprises one or more sgRNAs targeting exon 10 of fTNFRSF1A. In some embodiments, the CRISPR gene-editing system for the treatment of OA comprising one or more sgRNAs targeting an exon of fTNFRSF1A is delivered via one or more lipid nanoparticles (LNPs), the LNPs comprising an LNP system described herein, e.g., and without limitation, any one of LNP systems LNP001 to LNP240.

[0313] In some embodiments, the CRISPR gene-editing system for the treatment of OA comprises one or more sgRNAs targeting TNFRSF1B. In some embodiments, the CRISPR gene-editing system for the treatment of OA comprises one or more sgRNAs targeting hTNFRSF1B. In some embodiments, the CRISPR gene-editing system for the treatment of OA comprises one or more sgRNAs targeting cTNFRSF1B. In some embodiments, the CRISPR gene-editing system for the treatment of OA comprises one or more sgRNAs targeting eTNFRSF1B. In some embodiments, the CRISPR gene-editing system for the treatment of OA comprises one or more sgRNAs targeting fTNFRSF1B. In some embodiments, the CRISPR gene-editing system for the treatment of OA comprising one or more sgRNAs targeting an exon of TNFRSF1B is delivered via one or more lipid nanoparticles (LNPs), the LNPs comprising an LNP system described herein, e.g., and without limitation, any one of LNP systems LNP001 to LNP240.

[0314] In some embodiments, the CRISPR gene-editing system for the treatment of OA comprises one or more sgRNAs targeting exon 1 of hTNFRSF1B. In some embodiments, the CRISPR gene-editing system for the treatment of OA comprises one or more sgRNAs targeting exon 2 of hTNFRSF1B. In some embodiments, the CRISPR gene-editing system for the treatment of OA comprises one or more sgRNAs targeting exon 3 of hTNFRSF1B. In some embodiments, the CRISPR gene-editing system for the treatment of OA comprises one or more sgRNAs targeting exon 4 of hTNFRSF1B. In some embodiments, the CRISPR gene-editing system for the treatment of OA comprises one or more sgRNAs targeting exon 5 of hTNFRSF1B. In some embodiments, the CRISPR gene-editing system for the treatment of OA comprises one or more sgRNAs targeting exon 6 of hTNFRSF1B. In some embodiments, the CRISPR gene-editing system for the treatment of OA comprises one or more sgRNAs targeting exon 7 of hTNFRSF1B. In some embodiments, the CRISPR gene-editing system for the treatment of OA comprises one or more sgRNAs targeting exon 8 of hTNFRSF1B. In some embodiments, the CRISPR gene-editing system for the treatment of OA comprises one or more sgRNAs targeting exon 9 of hTNFRSF1B. In some embodiments, the CRISPR gene-editing system for the treatment of OA comprises one or more sgRNAs targeting exon 10 of hTNFRSF1B. In some embodiments, the CRISPR gene-editing system for the treatment of OA comprises one or more sgRNAs targeting exon 11 of hTNFRSF1B In some embodiments, the CRISPR gene-editing system for the treatment of OA comprises one or more sgRNAs targeting exon 12 of hTNFRSF1B. In some embodiments, the CRISPR gene-editing system for the treatment of OA comprises one or more sgRNAs targeting exon 13 of hTNFRSF1B. In some embodiments, the CRISPR gene-editing system for the treatment of OA comprising one or more sgRNAs targeting an exon of hTNFRSF1B is delivered via one or more lipid nanoparticles (LNPs), the LNPs comprising an LNP system described herein, e.g., and without limitation, any one of LNP systems LNP001 to LNP240.

[0315] In some embodiments, the CRISPR gene-editing system for the treatment of OA comprises one or more sgRNAs targeting exon 1 of cTNFRSF1B. In some embodiments, the CRISPR gene-editing system for the treatment of OA comprises one or more sgRNAs targeting exon 2 of cTNFRSF1B. In some embodiments, the CRISPR gene-editing system for the treatment of OA comprises one or more sgRNAs targeting exon 3 of cTNFRSF1B. In some embodiments, the CRISPR gene-editing system for the treatment of OA comprises one or more sgRNAs targeting exon 4 of cTNFRSF1B. In some embodiments, the CRISPR gene-editing system for the treatment of OA comprises one or more sgRNAs targeting exon 5 of cTNFRSF1B. In some embodiments, the CRISPR gene-editing system for the treatment of OA comprises one or more sgRNAs targeting exon 6 of cTNFRSF1B. In some embodiments, the CRISPR gene-editing system for the treatment of OA comprises one or more sgRNAs targeting exon 7 of cTNFRSF1B. In some embodiments, the CRISPR gene-editing system for the treatment of OA comprises one or more sgRNAs targeting exon 8 of cTNFRSF1B. In some embodiments, the CRISPR gene-editing system for the treatment of OA comprises one or more sgRNAs targeting exon 9 of cTNFRSF1B. In some embodiments, the CRISPR gene-editing system for the treatment of OA comprises one or more sgRNAs targeting exon 10 of cTNFRSF1B. In some embodiments, the CRISPR gene-editing system for the treatment of OA comprises one or more sgRNAs targeting exon 11 of cTNFRSF1B. In some embodiments, the CRISPR gene-editing system for the treatment of OA comprising one or more sgRNAs targeting an exon of cTNFRSF1B is delivered via one or more lipid nanoparticles (LNPs), the LNPs comprising an LNP system described herein, e.g., and without limitation, any one of LNP systems LNP001 to LNP240.

[0316] In some embodiments, the CRISPR gene-editing system for the treatment of OA comprises one or more sgRNAs targeting exon 1 of eTNFRSF1B. In some embodiments, the CRISPR gene-editing system for the treatment of OA comprises one or more sgRNAs targeting exon 2 of eTNFRSF1B. In some embodiments, the CRISPR gene-editing system for the treatment of OA comprises one or more sgRNAs targeting exon 3 of eTNFRSF1B. In some embodiments, the CRISPR gene-editing system for the treatment of OA comprises one or more sgRNAs targeting exon 4 of eTNFRSF1B. In some embodiments, the CRISPR gene-editing system for the treatment of OA comprises one or more sgRNAs targeting exon 5 of eTNFRSF1B. In some embodiments, the CRISPR gene-editing system for the treatment of OA comprises one or more sgRNAs targeting exon 6 of eTNFRSF1B. In some embodiments, the CRISPR gene-editing system for the treatment of OA comprises one or more sgRNAs targeting exon 7 of eTNFRSF1B. In some embodiments, the CRISPR gene-editing system for the treatment of OA comprises one or more sgRNAs targeting exon 8 of eTNFRSF1B. In some embodiments, the CRISPR gene-editing system for the treatment of OA comprises one or more sgRNAs targeting exon 9 of eTNFRSF1B. In some embodiments, the CRISPR gene-editing system for the treatment of OA comprises one or more sgRNAs targeting exon 10 of eTNFRSF1B. In some embodiments, the CRISPR gene-editing system for the treatment of OA comprises one or more sgRNAs targeting exon 11 of eTNFRSF1B. In some embodiments, the CRISPR gene-editing system for the treatment of OA comprising one or more sgRNAs targeting an exon of eTNFRSF1B is delivered via one or more lipid nanoparticles (LNPs), the LNPs comprising an LNP system described herein, e.g., and without limitation, any one of LNP systems LNP001 to LNP240.

[0317] In some embodiments, the CRISPR gene-editing system for the treatment of OA comprises one or more sgRNAs targeting exon 1 of fTNFRSF1B. In some embodiments, the CRISPR gene-editing system for the treatment of OA comprises one or more sgRNAs targeting exon 2 of fTNFRSF1B. In some embodiments, the CRISPR gene-editing system for the treatment of OA comprises one or more sgRNAs targeting exon 3 of fTNFRSF1B. In some embodiments, the CRISPR gene-editing system for the treatment of OA comprises one or more sgRNAs targeting exon 4 of fTNFRSF1B. In some embodiments, the CRISPR gene-editing system for the treatment of OA comprises one or more sgRNAs targeting exon 5 of fTNFRSF1B. In some embodiments, the CRISPR gene-editing system for the treatment of OA comprises one or more sgRNAs targeting exon 6 of fTNFRSF1B. In some embodiments, the CRISPR gene-editing system for the treatment of OA comprises one or more sgRNAs targeting exon 7 of fTNFRSF1B. In some embodiments, the CRISPR gene-editing system for the treatment of OA comprises one or more sgRNAs targeting exon 8 of fTNFRSF1B. In some embodiments, the CRISPR gene-editing system for the treatment of OA comprises one or more sgRNAs targeting exon 9 of fTNFRSF1B. In some embodiments, the CRISPR gene-editing system for the treatment of OA comprises one or more sgRNAs targeting exon 10 of fTNFRSF1B. In some embodiments, the CRISPR gene-editing system for the treatment of OA comprising one or more sgRNAs targeting an exon of fTNFRSF1B is delivered via one or more lipid nanoparticles (LNPs), the LNPs comprising an LNP system described herein, e.g., and without limitation, any one of LNP systems LNP001 to LNP240.

[0318] In some embodiments, the CRISPR gene-editing system for the treatment of OA comprises one or more sgRNAs targeting TNFRSF3. In some embodiments, the CRISPR gene-editing system for the treatment of OA comprises one or more sgRNAs targeting hTNFRSF3. In some embodiments, the CRISPR gene-editing system for the treatment of OA comprises one or more sgRNAs targeting cTNFRSF3. In some embodiments, the CRISPR gene-editing system for the treatment of OA comprises one or more sgRNAs targeting eTNFRSF3. In some embodiments, the CRISPR gene-editing system for the treatment of OA comprises one or more sgRNAs targeting fTNFRSF3. In some embodiments, the CRISPR gene-editing system for the treatment of OA comprising one or more sgRNAs targeting an exon of TNFRSF3 is delivered via one or more lipid nanoparticles (LNPs), the LNPs comprising an LNP system described herein, e.g., and without limitation, any one of LNP systems LNP001 to LNP240.

[0319] In some embodiments, the CRISPR gene-editing system for the treatment of OA comprises one or more sgRNAs targeting exon 1 of hTNFRSF3. In some embodiments, the CRISPR gene-editing system for the treatment of OA comprises one or more sgRNAs targeting exon 2 of hTNFRSF3. In some embodiments, the CRISPR gene-editing system for the treatment of OA comprises one or more sgRNAs targeting exon 3 of hTNFRSF3. In some embodiments, the CRISPR gene-editing system for the treatment of OA comprises one or more sgRNAs targeting exon 4 of hTNFRSF3. In some embodiments, the CRISPR gene-editing system for the treatment of OA comprises one or more sgRNAs targeting exon 5 of hTNFRSF3. In some embodiments, the CRISPR gene-editing system for the treatment of OA comprises one or more sgRNAs targeting exon 6 of hTNFRSF3. In some embodiments, the CRISPR gene-editing system for the treatment of OA comprises one or more sgRNAs targeting exon 7 of hTNFRSF3. In some embodiments, the CRISPR gene-editing system for the treatment of OA comprises one or more sgRNAs targeting exon 8 of hTNFRSF3. In some embodiments, the CRISPR gene-editing system for the treatment of OA comprises one or more sgRNAs targeting exon 9 of hTNFRSF3. In some embodiments, the CRISPR gene-editing system for the treatment of OA comprises one or more sgRNAs targeting exon 10 of hTNFRSF3. In some embodiments, the CRISPR gene-editing system for the treatment of OA comprises one or more sgRNAs targeting exon 11 of hTNFRSF3. In some embodiments, the CRISPR gene-editing system for the treatment of OA comprises one or more sgRNAs targeting exon 12 of hTNFRSF3. In some embodiments, the CRISPR gene-editing system for the treatment of OA comprising one or more sgRNAs targeting an exon of hTNFRSF3 is delivered via one or more lipid nanoparticles (LNPs), the LNPs comprising an LNP system described herein, e.g., and without limitation, any one of LNP systems LNP001 to LNP240.

[0320] In some embodiments, the CRISPR gene-editing system for the treatment of OA comprises one or more sgRNAs targeting exon 1 of cTNFRSF3. In some embodiments, the CRISPR gene-editing system for the treatment of OA comprises one or more sgRNAs targeting exon 2 of cTNFRSF3. In some embodiments, the CRISPR gene-editing system for the treatment of OA comprises one or more sgRNAs targeting exon 3 of cTNFRSF3. In some embodiments, the CRISPR gene-editing system for the treatment of OA comprises one or more sgRNAs targeting exon 4 of cTNFRSF3. In some embodiments, the CRISPR gene-editing system for the treatment of OA comprises one or more sgRNAs targeting exon 5 of cTNFRSF3. In some embodiments, the CRISPR gene-editing system for the treatment of OA comprises one or more sgRNAs targeting exon 6 of cTNFRSF3. In some embodiments, the CRISPR gene-editing system for the treatment of OA comprises one or more sgRNAs targeting exon 7 of cTNFRSF3. In some embodiments, the CRISPR gene-editing system for the treatment of OA comprises one or more sgRNAs targeting exon 8 of cTNFRSF3. In some embodiments, the CRISPR gene-editing system for the treatment of OA comprises one or more sgRNAs targeting exon 9 of cTNFRSF3. In some embodiments, the CRISPR gene-editing system for the treatment of OA comprises one or more sgRNAs targeting exon 10 of cTNFRSF3. In some embodiments, the CRISPR gene-editing system for the treatment of OA comprising one or more sgRNAs targeting an exon of cTNFRSF3 is delivered via one or more lipid nanoparticles (LNPs), the LNPs comprising an LNP system described herein, e.g., and without limitation, any one of LNP systems LNP001 to LNP240.

[0321] In some embodiments, the CRISPR gene-editing system for the treatment of OA comprises one or more sgRNAs targeting exon 1 of eTNFRSF3. In some embodiments, the CRISPR gene-editing system for the treatment of OA comprises one or more sgRNAs targeting exon 2 of eTNFRSF3. In some embodiments, the CRISPR gene-editing system for the treatment of OA comprises one or more sgRNAs targeting exon 3 of eTNFRSF3. In some embodiments, the CRISPR gene-editing system for the treatment of OA comprises one or more sgRNAs targeting exon 4 of eTNFRSF3. In some embodiments, the CRISPR gene-editing system for the treatment of OA comprises one or more sgRNAs targeting exon 5 of eTNFRSF3. In some embodiments, the CRISPR gene-editing system for the treatment of OA comprises one or more sgRNAs targeting exon 6 of eTNFRSF3. In some embodiments, the CRISPR gene-editing system for the treatment of OA comprises one or more sgRNAs targeting exon 7 of eTNFRSF3. In some embodiments, the CRISPR gene-editing system for the treatment of OA comprises one or more sgRNAs targeting exon 8 of eTNFRSF3. In some embodiments, the CRISPR gene-editing system for the treatment of OA comprises one or more sgRNAs targeting exon 9 of eTNFRSF3. In some embodiments, the CRISPR gene-editing system for the treatment of OA comprises one or more sgRNAs targeting exon 10 of eTNFRSF3. In some embodiments, the CRISPR gene-editing system for the treatment of OA comprising one or more sgRNAs targeting an exon of eTNFRSF3 is delivered via one or more lipid nanoparticles (LNPs), the LNPs comprising an LNP system described herein, e.g., and without limitation, any one of LNP systems LNP001 to LNP240.

[0322] In some embodiments, the CRISPR gene-editing system for the treatment of OA comprises one or more sgRNAs targeting exon 1 of fTNFRSF3. In some embodiments, the CRISPR gene-editing system for the treatment of OA comprises one or more sgRNAs targeting exon 2 of fTNFRSF3. In some embodiments, the CRISPR gene-editing system for the treatment of OA comprises one or more sgRNAs targeting exon 3 of fTNFRSF3. In some embodiments, the CRISPR gene-editing system for the treatment of OA comprises one or more sgRNAs targeting exon 4 of fTNFRSF3. In some embodiments, the CRISPR gene-editing system for the treatment of OA comprises one or more sgRNAs targeting exon 5 of fTNFRSF3. In some embodiments, the CRISPR gene-editing system for the treatment of OA comprises one or more sgRNAs targeting exon 6 of fTNFRSF3. In some embodiments, the CRISPR gene-editing system for the treatment of OA comprises one or more sgRNAs targeting exon 7 of fTNFRSF3. In some embodiments, the CRISPR gene-editing system for the treatment of OA comprises one or more sgRNAs targeting exon 8 of fTNFRSF3. In some embodiments, the CRISPR gene-editing system for the treatment of OA comprises one or more sgRNAs targeting exon 9 of fTNFRSF3. In some embodiments, the CRISPR gene-editing system for the treatment of OA comprises one or more sgRNAs targeting exon 10 of fTNFRSF3. In some embodiments, the CRISPR gene-editing system for the treatment of OA comprising one or more sgRNAs targeting an exon of fTNFRSF3 is delivered via one or more lipid nanoparticles (LNPs), the LNPs comprising an LNP system described herein, e.g., and without limitation, any one of LNP systems LNP001 to LNP240.

[0323] In some embodiments, the CRISPR gene-editing system for the treatment of OA comprises one or more sgRNAs targeting TNFRSF4. In some embodiments, the CRISPR gene-editing system for the treatment of OA comprises one or more sgRNAs targeting hTNFRSF4. In some embodiments, the CRISPR gene-editing system for the treatment of OA comprises one or more sgRNAs targeting cTNFRSF4. In some embodiments, the CRISPR gene-editing system for the treatment of OA comprises one or more sgRNAs targeting eTNFRSF4. In some embodiments, the CRISPR gene-editing system for the treatment of OA comprises one or more sgRNAs targeting fTNFRSF4. In some embodiments, the CRISPR gene-editing system for the treatment of OA comprising one or more sgRNAs targeting an exon of TNFRSF4 is delivered via one or more lipid nanoparticles (LNPs), the LNPs comprising an LNP system described herein, e.g., and without limitation, any one of LNP systems LNP001 to LNP240.

[0324] In some embodiments, the CRISPR gene-editing system for the treatment of OA comprises one or more sgRNAs targeting exon 1 of hTNFRSF4. In some embodiments, the CRISPR gene-editing system for the treatment of OA comprises one or more sgRNAs targeting exon 2 of hTNFRSF4. In some embodiments, the CRISPR gene-editing system for the treatment of OA comprises one or more sgRNAs targeting exon 3 of hTNFRSF4. In some embodiments, the CRISPR gene-editing system for the treatment of OA comprises one or more sgRNAs targeting exon 4 of hTNFRSF4. In some embodiments, the CRISPR gene-editing system for the treatment of OA comprises one or more sgRNAs targeting exon 5 of hTNFRSF4. In some embodiments, the CRISPR gene-editing system for the treatment of OA comprises one or more sgRNAs targeting exon 6 of hTNFRSF4. In some embodiments, the CRISPR gene-editing system for the treatment of OA comprising one or more sgRNAs targeting an exon of hTNFRSF4 is delivered via one or more lipid nanoparticles (LNPs), the LNPs comprising an LNP system described herein, e.g., and without limitation, any one of LNP systems LNP001 to LNP240.

[0325] In some embodiments, the CRISPR gene-editing system for the treatment of OA comprises one or more sgRNAs targeting exon 1 of cTNFRSF4. In some embodiments, the CRISPR gene-editing system for the treatment of OA comprises one or more sgRNAs targeting exon 2 of cTNFRSF4. In some embodiments, the CRISPR gene-editing system for the treatment of OA comprises one or more sgRNAs targeting exon 3 of cTNFRSF4. In some embodiments, the CRISPR gene-editing system for the treatment of OA comprises one or more sgRNAs targeting exon 4 of cTNFRSF4. In some embodiments, the CRISPR gene-editing system for the treatment of OA comprises one or more sgRNAs targeting exon 5 of cTNFRSF4. In some embodiments, the CRISPR gene-editing system for the treatment of OA comprises one or more sgRNAs targeting exon 6 of cTNFRSF4. In some embodiments, the CRISPR gene-editing system for the treatment of OA comprises one or more sgRNAs targeting exon 7 of cTNFRSF4. In some embodiments, the CRISPR gene-editing system for the treatment of OA comprising one or more sgRNAs targeting an exon of cTNFRSF4 is delivered via one or more lipid nanoparticles (LNPs), the LNPs comprising an LNP system described herein, e.g., and without limitation, any one of LNP systems LNP001 to LNP240.

[0326] In some embodiments, the CRISPR gene-editing system for the treatment of OA comprises one or more sgRNAs targeting exon 1 of eTNFRSF4. In some embodiments, the CRISPR gene-editing system for the treatment of OA comprises one or more sgRNAs targeting exon 2 of eTNFRSF4. In some embodiments, the CRISPR gene-editing system for the treatment of OA comprises one or more sgRNAs targeting exon 3 of eTNFRSF4. In some embodiments, the CRISPR gene-editing system for the treatment of OA comprises one or more sgRNAs targeting exon 4 of eTNFRSF4. In some embodiments, the CRISPR gene-editing system for the treatment of OA comprises one or more sgRNAs targeting exon 5 of eTNFRSF4. In some embodiments, the CRISPR gene-editing system for the treatment of OA comprises one or more sgRNAs targeting exon 6 of eTNFRSF4. In some embodiments, the CRISPR gene-editing system for the treatment of OA comprises one or more sgRNAs targeting exon 7 of eTNFRSF4. In some embodiments, the CRISPR gene-editing system for the treatment of OA comprising one or more sgRNAs targeting an exon of eTNFRSF4 is delivered via one or more lipid nanoparticles (LNPs), the LNPs comprising an LNP system described herein, e.g., and without limitation, any one of LNP systems LNP001 to LNP240.

[0327] In some embodiments, the CRISPR gene-editing system for the treatment of OA comprises one or more sgRNAs targeting exon 1 of fTNFRSF4. In some embodiments, the CRISPR gene-editing system for the treatment of OA comprises one or more sgRNAs targeting exon 2 of fTNFRSF4. In some embodiments, the CRISPR gene-editing system for the treatment of OA comprises one or more sgRNAs targeting exon 3 of fTNFRSF4. In some embodiments, the CRISPR gene-editing system for the treatment of OA comprises one or more sgRNAs targeting exon 4 of fTNFRSF4. In some embodiments, the CRISPR gene-editing system for the treatment of OA comprises one or more sgRNAs targeting exon 5 of fTNFRSF4. In some embodiments, the CRISPR gene-editing system for the treatment of OA comprises one or more sgRNAs targeting exon 6 of fTNFRSF4. In some embodiments, the CRISPR gene-editing system for the treatment of OA comprises one or more sgRNAs targeting exon 7 of fTNFRSF4. In some embodiments, the CRISPR gene-editing system for the treatment of OA comprising one or more sgRNAs targeting an exon of fTNFRSF4 is delivered via one or more lipid nanoparticles (LNPs), the LNPs comprising an LNP system described herein, e.g., and without limitation, any one of LNP systems LNP001 to LNP240.

[0328] In some embodiments, the CRISPR gene-editing system for the treatment of OA comprises one or more sgRNAs targeting TNFRSF11A. In some embodiments, the CRISPR gene-editing system for the treatment of OA comprises one or more sgRNAs targeting hTNFRSF11A. In some embodiments, the CRISPR gene-editing system for the treatment of OA comprises one or more sgRNAs targeting cTNFRSF11A. In some embodiments, the CRISPR gene-editing system for the treatment of OA comprises one or more sgRNAs targeting eTNFRSF11A. In some embodiments, the CRISPR gene-editing system for the treatment of OA comprises one or more sgRNAs targeting fTNFRSF11A. In some embodiments, the CRISPR gene-editing system for the treatment of OA comprising one or more sgRNAs targeting an exon of TNFRSF11A is delivered via one or more lipid nanoparticles (LNPs), the LNPs comprising an LNP system described herein, e.g., and without limitation, any one of LNP systems LNP001 to LNP240.

[0329] In some embodiments, the CRISPR gene-editing system for the treatment of OA comprises one or more sgRNAs targeting exon 1 of hTNFRSF11A. In some embodiments, the CRISPR gene-editing system for the treatment of OA comprises one or more sgRNAs targeting exon 2 of hTNFRSF11A. In some embodiments, the CRISPR gene-editing system for the treatment of OA comprises one or more sgRNAs targeting exon 3 of hTNFRSF11A. In some embodiments, the CRISPR gene-editing system for the treatment of OA comprises one or more sgRNAs targeting exon 4 of hTNFRSF11A. In some embodiments, the CRISPR gene-editing system for the treatment of OA comprises one or more sgRNAs targeting exon 5 of hTNFRSF11A. In some embodiments, the CRISPR gene-editing system for the treatment of OA comprises one or more sgRNAs targeting exon 6 of hTNFRSF11A. In some embodiments, the CRISPR gene-editing system for the treatment of OA comprises one or more sgRNAs targeting exon 7 of hTNFRSF11A. In some embodiments, the CRISPR gene-editing system for the treatment of OA comprises one or more sgRNAs targeting exon 8 of hTNFRSF11A. In some embodiments, the CRISPR gene-editing system for the treatment of OA comprises one or more sgRNAs targeting exon 9 of hTNFRSF11A. In some embodiments, the CRISPR gene-editing system for the treatment of OA comprises one or more sgRNAs targeting exon 10 of hTNFRSF11A. In some embodiments, the CRISPR gene-editing system for the treatment of OA comprises one or more sgRNAs targeting exon 11 of hTNFRSF11A. In some embodiments, the CRISPR gene-editing system for the treatment of OA comprises one or more sgRNAs targeting exon 12 of hTNFRSF11A. In some embodiments, the CRISPR gene-editing system for the treatment of OA comprising one or more sgRNAs targeting an exon of hTNFRSF11A is delivered via one or more lipid nanoparticles (LNPs), the LNPs comprising an LNP system described herein, e.g., and without limitation, any one of LNP systems LNP001 to LNP240.

[0330] In some embodiments, the CRISPR gene-editing system for the treatment of OA comprises one or more sgRNAs targeting exon 1 of cTNFRSF11A. In some embodiments, the CRISPR gene-editing system for the treatment of OA comprises one or more sgRNAs targeting exon 2 of cTNFRSF11A. In some embodiments, the CRISPR gene-editing system for the treatment of OA comprises one or more sgRNAs targeting exon 3 of cTNFRSF11A. In some embodiments, the CRISPR gene-editing system for the treatment of OA comprises one or more sgRNAs targeting exon 4 of cTNFRSF11A. In some embodiments, the CRISPR gene-editing system for the treatment of OA comprises one or more sgRNAs targeting exon 5 of cTNFRSF11A. In some embodiments, the CRISPR gene-editing system for the treatment of OA comprises one or more sgRNAs targeting exon 6 of cTNFRSF11A. In some embodiments, the CRISPR gene-editing system for the treatment of OA comprises one or more sgRNAs targeting exon 7 of cTNFRSF11A. In some embodiments, the CRISPR gene-editing system for the treatment of OA comprises one or more sgRNAs targeting exon 8 of cTNFRSF11A. In some embodiments, the CRISPR gene-editing system for the treatment of OA comprises one or more sgRNAs targeting exon 9 of cTNFRSF11A. In some embodiments, the CRISPR gene-editing system for the treatment of OA comprises one or more sgRNAs targeting exon 10 of cTNFRSF11A. In some embodiments, the CRISPR gene-editing system for the treatment of OA comprises one or more sgRNAs targeting exon 11 of cTNFRSF11A. In some embodiments, the CRISPR gene-editing system for the treatment of OA comprising one or more sgRNAs targeting an exon of cTNFRSF11A is delivered via one or more lipid nanoparticles (LNPs), the LNPs comprising an LNP system described herein, e.g., and without limitation, any one of LNP systems LNP001 to LNP240.

[0331] In some embodiments, the CRISPR gene-editing system for the treatment of OA comprises one or more sgRNAs targeting exon 1 of eTNFRSF11A. In some embodiments, the CRISPR gene-editing system for the treatment of OA comprises one or more sgRNAs targeting exon 2 of eTNFRSF11A. In some embodiments, the CRISPR gene-editing system for the treatment of OA comprises one or more sgRNAs targeting exon 3 of eTNFRSF11A. In some embodiments, the CRISPR gene-editing system for the treatment of OA comprises one or more sgRNAs targeting exon 4 of eTNFRSF11A. In some embodiments, the CRISPR gene-editing system for the treatment of OA comprises one or more sgRNAs targeting exon 5 of eTNFRSF11A. In some embodiments, the CRISPR gene-editing system for the treatment of OA comprises one or more sgRNAs targeting exon 6 of eTNFRSF11A. In some embodiments, the CRISPR gene-editing system for the treatment of OA comprises one or more sgRNAs targeting exon 7 of eTNFRSF11A. In some embodiments, the CRISPR gene-editing system for the treatment of OA comprises one or more sgRNAs targeting exon 8 of eTNFRSF11A. In some embodiments, the CRISPR gene-editing system for the treatment of OA comprises one or more sgRNAs targeting exon 9 of eTNFRSF11A. In some embodiments, the CRISPR gene-editing system for the treatment of OA comprises one or more sgRNAs targeting exon 10 of eTNFRSF11A. In some embodiments, the CRISPR gene-editing system for the treatment of OA comprising one or more sgRNAs targeting an exon of eTNFRSF11A is delivered via one or more lipid nanoparticles (LNPs), the LNPs comprising an LNP system described herein, e.g., and without limitation, any one of LNP systems LNP001 to LNP240.

[0332] In some embodiments, the CRISPR gene-editing system for the treatment of OA comprises one or more sgRNAs targeting exon 1 of fTNFRSF11A. In some embodiments, the CRISPR gene-editing system for the treatment of OA comprises one or more sgRNAs targeting exon 2 of fTNFRSF11A. In some embodiments, the CRISPR gene-editing system for the treatment of OA comprises one or more sgRNAs targeting exon 3 of fTNFRSF11A. In some embodiments, the CRISPR gene-editing system for the treatment of OA comprises one or more sgRNAs targeting exon 4 of fTNFRSF11A. In some embodiments, the CRISPR gene-editing system for the treatment of OA comprises one or more sgRNAs targeting exon 5 of fTNFRSF11A. In some embodiments, the CRISPR gene-editing system for the treatment of OA comprises one or more sgRNAs targeting exon 6 of fTNFRSF11A. In some embodiments, the CRISPR gene-editing system for the treatment of OA comprises one or more sgRNAs targeting exon 7 of fTNFRSF11A. In some embodiments, the CRISPR gene-editing system for the treatment of OA comprises one or more sgRNAs targeting exon 8 of fTNFRSF11A. In some embodiments, the CRISPR gene-editing system for the treatment of OA comprises one or more sgRNAs targeting exon 9 of fTNFRSF11A. In some embodiments, the CRISPR gene-editing system for the treatment of OA comprises one or more sgRNAs targeting exon 10 of fTNFRSF11A. In some embodiments, the CRISPR gene-editing system for the treatment of OA comprises one or more sgRNAs targeting exon 11 of fTNFRSF11A. In some embodiments, the CRISPR gene-editing system for the treatment of OA comprising one or more sgRNAs targeting an exon of fTNFRSF11A is delivered via one or more lipid nanoparticles (LNPs), the LNPs comprising an LNP system described herein, e.g., and without limitation, any one of LNP systems LNP001 to LNP240.

### C. Psoriatic Arthritis

[0333] In one aspect, the present disclosure encompasses treatments for psoriatic arthritis (PsA). In some embodiments, the psoriatic arthritis treatment comprises a therapeutically effective amount of a Clustered Regularly Interspaced Short Palindromic Repeats (CRISPR) gene-editing system, the system comprising: (i) a CRISPR Associated (Cas) protein; and (ii) at least one guide RNA targeting IL1R1. In some embodiments, the psoriatic arthritis treatment comprises a CRISPR gene-editing system targeting hIL1R1. In some embodiments, the psoriatic arthritis treatment comprises a CRISPR gene-editing system targeting cIL1R1. In some embodiments, the psoriatic arthritis treatment comprises a CRISP gene-editing system R targeting eIL1R1. In some embodiments, the psoriatic arthritis treatment comprises a CRISPR gene-editing system targeting fIL1R1. In some embodiments, the CRISPR gene-editing system for the treatment of PsA comprising one or more sgRNAs targeting an exon of IL1R1 is delivered via one or more lipid nanoparticles (LNPs), the LNPs comprising an LNP system described herein, e.g., and without limitation, any one of LNP systems LNP001 to LNP240.

[0334] In some embodiments, the CRISPR gene-editing system for the treatment of psoriatic arthritis comprises one or more sgRNAs targeting exon 1 of hIL1R1. In some embodiments, the CRISPR gene-editing system for the treatment of psoriatic arthritis comprises one or more sgRNAs targeting exon 2 of hIL1R1. In some embodiments, the CRISPR gene-editing system for the treatment of psoriatic arthritis comprises one or more sgRNAs targeting exon 3 of hIL1R1. In some embodiments, the CRISPR gene-editing system for the treatment of psoriatic arthritis comprises one or more sgRNAs targeting exon 4 of hIL1R1. In some embodiments, the CRISPR gene-editing system for the treatment of psoriatic arthritis comprises one or more sgRNAs targeting exon 5 of hIL1R1. In some embodiments, the CRISPR gene-editing system for the treatment of psoriatic arthritis comprises one or more sgRNAs targeting exon 6 of hIL1R1. In some embodiments, the CRISPR gene-editing system for the treatment of psoriatic arthritis comprises one or more sgRNAs targeting exon 7 of hIL1R1. In some embodiments, the CRISPR gene-editing system for the treatment of psoriatic arthritis comprises one or more sgRNAs targeting exon 8 of hIL1R1. In some embodiments, the CRISPR gene-editing system for the treatment of psoriatic arthritis comprises one or more sgRNAs targeting exon 9 of hIL1R1. In some embodiments, the CRISPR gene-editing system for the treatment of psoriatic arthritis comprises one or more sgRNAs targeting exon 10 of hIL1R1. In some embodiments, the CRISPR gene-editing system for the treatment of psoriatic arthritis comprises one or more sgRNAs targeting exon 11 of hIL1R1. In some embodiments, the CRISPR gene-editing system for the treatment of psoriatic arthritis comprises one or more sgRNAs targeting exon 12 of hIL1R1. In some embodiments, the CRISPR gene-editing system for the treatment of psoriatic arthritis comprises one or more sgRNAs targeting exon 13 of hIL1R1. In some embodiments, the CRISPR gene-editing system for the treatment of psoriatic arthritis comprises one or more sgRNAs targeting exon 14 of hIL1R1. In some embodiments, the CRISPR gene-editing system for the treatment of psoriatic arthritis comprises one or more sgRNAs targeting exon 15 of hIL1R1. In some embodiments, the CRISPR gene-editing system for the treatment of psoriatic arthritis comprises one or more sgRNAs targeting exon 16 of hIL1R1. In some embodiments, the CRISPR gene-editing system for the treatment of psoriatic arthritis comprises one or more sgRNAs targeting exon 17 of hIL1R1. In some embodiments, the CRISPR gene-editing system for the treatment of psoriatic arthritis comprises one or more sgRNAs targeting exon 18 of hIL1R1. In some embodiments, the CRISPR gene-editing system for the treatment of psoriatic arthritis comprises one or more sgRNAs targeting exon 19 of hIL1R1. In some embodiments, the CRISPR gene-editing system for the treatment of psoriatic arthritis comprises one or more sgRNAs targeting exon 20 of hIL1R1. In some embodiments, the CRISPR gene-editing system for the treatment of psoriatic arthritis comprises one or more sgRNAs targeting exon 21 of hIL1R1. In some embodiments, the CRISPR gene-editing system for the treatment of PsA comprising one or more sgRNAs targeting an exon of hIL1R1 is delivered via one or more lipid nanoparticles (LNPs), the LNPs comprising an LNP system described herein, e.g., and without limitation, any one of LNP systems LNP001 to LNP240.

[0335] In some embodiments, the CRISPR gene-editing system for the treatment of psoriatic arthritis comprises one or more sgRNAs targeting exon 1 of cIL1R1. In some embodiments, the CRISPR gene-editing system for the treatment of psoriatic arthritis comprises one or more sgRNAs targeting exon 2 of cIL1R. In some embodiments, the CRISPR gene-editing system for the treatment of psoriatic arthritis comprises one or more sgRNAs targeting exon 3 of cIL1R1. In some embodiments, the CRISPR gene-editing system for the treatment of psoriatic arthritis comprises one or more sgRNAs targeting exon 4 of cIL1R1. In some embodiments, the CRISPR gene-editing system for the treatment of psoriatic arthritis comprises one or more sgRNAs targeting exon 5 of cIL1R1. In some embodiments, the CRISPR gene-editing system for the treatment of psoriatic arthritis comprises one or more sgRNAs targeting exon 6 of cIL1R1. In some embodiments, the CRISPR gene-editing system for the treatment of psoriatic arthritis comprises one or more sgRNAs targeting exon 7 of cIL1R1. In some embodiments, the CRISPR gene-editing system for the treatment of psoriatic arthritis comprises one or more sgRNAs targeting exon 8 of cIL1R1. In some embodiments, the CRISPR gene-editing system for the treatment of psoriatic arthritis comprises one or more sgRNAs targeting exon 9 of cIL1R1. In some embodiments, the CRISPR gene-editing system for the treatment of psoriatic arthritis comprises one or more sgRNAs targeting exon 10 of cIL1R1. In some embodiments, the CRISPR gene-editing system for the treatment of psoriatic arthritis comprises one or more sgRNAs targeting exon 11 of cIL1R1. In some embodiments, the CRISPR gene-editing system for the treatment of psoriatic arthritis comprises one or more sgRNAs targeting exon 12 of cIL1R1. In some embodiments, the CRISPR gene-editing system for the treatment of psoriatic arthritis comprises one or more sgRNAs targeting exon 13 of cIL1R1. In some embodiments, the CRISPR gene-editing system for the treatment of psoriatic arthritis comprises one or more sgRNAs targeting exon 14 of cIL1R1. In some embodiments, the CRISPR gene-editing system for the treatment of psoriatic arthritis comprises one or more sgRNAs targeting exon 15 of cIL1R1. In some embodiments, the CRISPR gene-editing system for the treatment of psoriatic arthritis comprises one or more sgRNAs targeting exon 16 of cIL1R1. In some embodiments, the CRISPR gene-editing system for the treatment of PsA comprising one or more sgRNAs targeting an exon of cIL1R1 is delivered via one or more lipid nanoparticles (LNPs), the LNPs comprising an LNP system described herein, e.g., and without limitation, any one of LNP systems LNP001 to LNP240.

[0336] In some embodiments, the CRISPR gene-editing system for the treatment of psoriatic arthritis comprises one or more sgRNAs targeting exon 1 of eIL1R1. In some embodiments, the CRISPR gene-editing system for the treatment of psoriatic arthritis comprises one or more sgRNAs targeting exon 2 of eIL1R1. In some embodiments, the CRISPR gene-editing system for the treatment of psoriatic arthritis comprises one or more sgRNAs targeting exon 3 of eIL1R1. In some embodiments, the CRISPR gene-editing system for the treatment of psoriatic arthritis comprises one or more sgRNAs targeting exon 4 of eIL1R1. In some embodiments, the CRISPR gene-editing system for the treatment of psoriatic arthritis comprises one or more sgRNAs targeting exon 5 of eIL1R1. In some embodiments, the CRISPR gene-editing system for the treatment of psoriatic arthritis comprises one or more sgRNAs targeting exon 6 of eIL1R1. In some embodiments, the CRISPR gene-editing system for the treatment of psoriatic arthritis comprises one or more sgRNAs targeting exon 7 of eIL1R1. In some embodiments, the CRISPR gene-editing system for the treatment of psoriatic arthritis comprises one or more sgRNAs targeting exon 8 of eIL1R1. In some embodiments, the CRISPR gene-editing system for the treatment of psoriatic arthritis comprises one or more sgRNAs targeting exon 9 of eIL1R1. In some embodiments, the CRISPR gene-editing system for the treatment of psoriatic arthritis comprises one or more sgRNAs targeting exon 10 of eIL1R1. In some embodiments, the CRISPR gene-editing system for the treatment of psoriatic arthritis comprises one or more sgRNAs targeting exon 11 of eIL1R1. In some embodiments, the CRISPR gene-editing system for the treatment of psoriatic arthritis comprises one or more sgRNAs targeting exon 12 of eIL1R1. In some embodiments, the CRISPR gene-editing system for the treatment of psoriatic arthritis comprises one or more sgRNAs targeting exon 13 of eIL1R1. In some embodiments, the CRISPR gene-editing system for the treatment of psoriatic arthritis comprises one or more sgRNAs targeting exon 14 of eIL1R1. In some embodiments, the CRISPR gene-editing system for the treatment of psoriatic arthritis comprises one or more sgRNAs targeting exon 15 of eIL1R1. In some embodiments, the CRISPR gene-editing system for the treatment of PsA comprising one or more sgRNAs targeting an exon of eIL1R1 is delivered via one or more lipid nanoparticles (LNPs), the LNPs comprising an LNP system described herein, e.g., and without limitation, any one of LNP systems LNP001 to LNP240.

[0337] In some embodiments, the CRISPR gene-editing system for the treatment of psoriatic arthritis comprises one or more sgRNAs targeting exon 1 of fIL1R1. In some embodiments, the CRISPR gene-editing system for the treatment of psoriatic arthritis comprises one or more sgRNAs targeting exon 2 of fIL1R1. In some embodiments, the CRISPR gene-editing system for the treatment of psoriatic arthritis comprises one or more sgRNAs targeting exon 3 of fIL1R1. In some embodiments, the CRISPR gene-editing system for the treatment of psoriatic arthritis comprises one or more sgRNAs targeting exon 4 of fIL1R1. In some embodiments, the CRISPR gene-editing system for the treatment of psoriatic arthritis comprises one or more sgRNAs targeting exon 5 of fIL1R1. In some embodiments, the CRISPR gene-editing system for the treatment of psoriatic arthritis comprises one or more sgRNAs targeting exon 6 of fIL1R1. In some embodiments, the CRISPR gene-editing system for the treatment of psoriatic arthritis comprises one or more sgRNAs targeting exon 7 of fIL1R1. In some embodiments, the CRISPR gene-editing system for the treatment of psoriatic arthritis comprises one or more sgRNAs targeting exon 8 of fIL1R1. In some embodiments, the CRISPR gene-editing system for the treatment of psoriatic arthritis comprises one or more sgRNAs targeting exon 9 of fIL1R1. In some embodiments, the CRISPR gene-editing system for the treatment of psoriatic arthritis comprises one or more sgRNAs targeting exon 10 of fIL1R1. In some embodiments, the CRISPR gene-editing system for the treatment of psoriatic arthritis comprises one or more sgRNAs targeting exon 11 of fIL1R1. In some embodiments, the CRISPR gene-editing system for the treatment of psoriatic arthritis comprises one or more sgRNAs targeting exon 12 of fIL1R1. In some embodiments, the CRISPR gene-editing system for the treatment of psoriatic arthritis comprises one or more sgRNAs targeting exon 13 of fIL1R1. In some embodiments, the CRISPR gene-editing system for the treatment of psoriatic arthritis comprises one or more sgRNAs targeting exon 14 of fIL1R1. In some embodiments, the CRISPR gene-editing system for the treatment of psoriatic arthritis comprises one or more sgRNAs targeting exon 15 of fIL1R1. In some embodiments, the CRISPR gene-editing system for the treatment of psoriatic arthritis comprises one or more sgRNAs targeting exon 16 of fIL1R1. In some embodiments, the CRISPR gene-editing system for the treatment of psoriatic arthritis comprises one or more sgRNAs targeting exon 17 of fIL1R. In some embodiments, the CRISPR gene-editing system for the treatment of psoriatic arthritis comprises one or more sgRNAs targeting exon 18 of fIL1R1. In some embodiments, the CRISPR gene-editing system for the treatment of PsA comprising one or more sgRNAs targeting an exon of fIL1R1 is delivered via one or more lipid nanoparticles (LNPs), the LNPs comprising an LNP system described herein, e.g., and without limitation, any one of LNP systems LNP001 to LNP240.

[0338] In some embodiments, the CRISPR gene-editing system for the treatment of psoriatic arthritis comprises one or more sgRNAs targeting IL1RAP. In some embodiments, the CRISPR gene-editing system for the treatment of psoriatic arthritis comprises one or more sgRNAs targeting hIL1RAP. In some embodiments, the CRISPR gene-editing system for the treatment of psoriatic arthritis comprises one or more sgRNAs targeting cIL1RAP. In some embodiments, the CRISPR gene-editing system for the treatment of psoriatic arthritis comprises one or more sgRNAs targeting eIL1RAP. In some embodiments, the CRISPR gene-editing system for the treatment of psoriatic arthritis comprises one or more sgRNAs targeting fIL1RAP. In some embodiments, the CRISPR gene-editing system for the treatment of PsA comprising one or more sgRNAs targeting an exon of IL1RAP is delivered via one or more lipid nanoparticles (LNPs), the LNPs comprising an LNP system described herein, e.g., and without limitation, any one of LNP systems LNP001 to LNP240.

[0339] In some embodiments, the CRISPR gene-editing system for the treatment of psoriatic arthritis comprises one or more sgRNAs targeting exon 1 of hIL1RAP. In some embodiments, the CRISPR gene-editing system for the treatment of psoriatic arthritis comprises one or more sgRNAs targeting exon 2 of hIL1RAP. In some embodiments, the CRISPR gene-editing system for the treatment of psoriatic arthritis comprises one or more sgRNAs targeting exon 3 of hIL1RAP. In some embodiments, the CRISPR gene-editing system for the treatment of psoriatic arthritis comprises one or more sgRNAs targeting exon 4 of hIL1RAP. In some embodiments, the CRISPR gene-editing system for the treatment of psoriatic arthritis comprises one or more sgRNAs targeting exon 5 of hIL1RAP. In some embodiments, the CRISPR gene-editing system for the treatment of psoriatic arthritis comprises one or more sgRNAs targeting exon 6 of hIL1RAP. In some embodiments, the CRISPR gene-editing system for the treatment of psoriatic arthritis comprises one or more sgRNAs targeting exon 7 of hIL1RAP. In some embodiments, the CRISPR gene-editing system for the treatment of psoriatic arthritis comprises one or more sgRNAs targeting exon 8 of hIL1RAP. In some embodiments, the CRISPR gene-editing system for the treatment of psoriatic arthritis comprises one or more sgRNAs targeting exon 9 of hIL1RAP. In some embodiments, the CRISPR gene-editing system for the treatment of psoriatic arthritis comprises one or more sgRNAs targeting exon 10 of hIL1RAP. In some embodiments, the CRISPR gene-editing system for the treatment of psoriatic arthritis comprises one or more sgRNAs targeting exon 11 of hIL1RAP. In some embodiments, the CRISPR gene-editing system for the treatment of psoriatic arthritis comprises one or more sgRNAs targeting exon 12 of hIL1RAP. In some embodiments, the CRISPR gene-editing system for the treatment of psoriatic arthritis comprises one or more sgRNAs targeting exon 13 of hIL1RAP. In some embodiments, the CRISPR gene-editing system for the treatment of psoriatic arthritis comprises one or more sgRNAs targeting exon 14 of hIL1RAP. In some embodiments, the CRISPR gene-editing system for the treatment of psoriatic arthritis comprises one or more sgRNAs targeting exon 15 of hIL1RAP. In some embodiments, the CRISPR gene-editing system for the treatment of psoriatic arthritis comprises one or more sgRNAs targeting exon 16 of hIL1RAP. In some embodiments, the CRISPR gene-editing system for the treatment of psoriatic arthritis comprises one or more sgRNAs targeting exon 17 of hIL1RAP. In some embodiments, the CRISPR gene-editing system for the treatment of PsA comprising one or more sgRNAs targeting an exon of hIL1RAP is delivered via one or more lipid nanoparticles (LNPs), the LNPs comprising an LNP system described herein, e.g., and without limitation, any one of LNP systems LNP001 to LNP240.

[0340] In some embodiments, the CRISPR gene-editing system for the treatment of psoriatic arthritis comprises one or more sgRNAs targeting exon 1 of cIL1RAP. In some embodiments, the CRISPR gene-editing system for the treatment of psoriatic arthritis comprises one or more sgRNAs targeting exon 2 of cIL1RAP. In some embodiments, the CRISPR gene-editing system for the treatment of psoriatic arthritis comprises one or more sgRNAs targeting exon 3 of cIL1RAP. In some embodiments, the CRISPR gene-editing system for the treatment of psoriatic arthritis comprises one or more sgRNAs targeting exon 4 of cIL1RAP. In some embodiments, the CRISPR gene-editing system for the treatment of psoriatic arthritis comprises one or more sgRNAs targeting exon 5 of cIL1RAP. In some embodiments, the CRISPR gene-editing system for the treatment of psoriatic arthritis comprises one or more sgRNAs targeting exon 6 of cIL1RAP. In some embodiments, the CRISPR gene-editing system for the treatment of psoriatic arthritis comprises one or more sgRNAs targeting exon 7 of cIL1RAP. In some embodiments, the CRISPR gene-editing system for the treatment of psoriatic arthritis comprises one or more sgRNAs targeting exon 8 of cIL1RAP. In some embodiments, the CRISPR gene-editing system for the treatment of psoriatic arthritis comprises one or more sgRNAs targeting exon 9 of cIL1RAP. In some embodiments, the CRISPR gene-editing system for the treatment of psoriatic arthritis comprises one or more sgRNAs targeting exon 10 of cIL1RAP. In some embodiments, the CRISPR gene-editing system for the treatment of psoriatic arthritis comprises one or more sgRNAs targeting exon 11 of cIL1RAP. In some embodiments, the CRISPR gene-editing system for the treatment of psoriatic arthritis comprises one or more sgRNAs targeting exon 12 of cIL1RAP. In some embodiments, the CRISPR gene-editing system for the treatment of psoriatic arthritis comprises one or more sgRNAs targeting exon 13 of cIL1RAP. In some embodiments, the CRISPR gene-editing system for the treatment of psoriatic arthritis comprises one or more sgRNAs targeting exon 14 of cIL1RAP. In some embodiments, the CRISPR gene-editing system for the treatment of psoriatic arthritis comprises one or more sgRNAs targeting exon 15 of cIL1RAP. In some embodiments, the CRISPR gene-editing system for the treatment of psoriatic arthritis comprises one or more sgRNAs targeting exon 16 of cIL1RAP. In some embodiments, the CRISPR gene-editing system for the treatment of PsA comprising one or more sgRNAs targeting an exon of cIL1RAP is delivered via one or more lipid nanoparticles (LNPs), the LNPs comprising an LNP system described herein, e.g., and without limitation, any one of LNP systems LNP001 to LNP240.

[0341] In some embodiments, the CRISPR gene-editing system for the treatment of psoriatic arthritis comprises one or more sgRNAs targeting exon 1 of eIL1RAP. In some embodiments, the CRISPR gene-editing system for the treatment of psoriatic arthritis comprises one or more sgRNAs targeting exon 2 of eIL1RAP. In some embodiments, the CRISPR gene-editing system for the treatment of psoriatic arthritis comprises one or more sgRNAs targeting exon 3 of eIL1RAP. In some embodiments, the CRISPR gene-editing system for the treatment of psoriatic arthritis comprises one or more sgRNAs targeting exon 4 of eIL1RAP. In some embodiments, the CRISPR gene-editing system for the treatment of psoriatic arthritis comprises one or more sgRNAs targeting exon 5 of eIL1RAP. In some embodiments, the CRISPR gene-editing system for the treatment of psoriatic arthritis comprises one or more sgRNAs targeting exon 6 of eIL1RAP. In some embodiments, the CRISPR gene-editing system for the treatment of psoriatic arthritis comprises one or more sgRNAs targeting exon 7 of eIL1RAP. In some embodiments, the CRISPR gene-editing system for the treatment of psoriatic arthritis comprises one or more sgRNAs targeting exon 8 of eIL1RAP. In some embodiments, the CRISPR gene-editing system for the treatment of psoriatic arthritis comprises one or more sgRNAs targeting exon 9 of eIL1RAP. In some embodiments, the CRISPR gene-editing system for the treatment of psoriatic arthritis comprises one or more sgRNAs targeting exon 10 of eIL1RAP. In some embodiments, the CRISPR gene-editing system for the treatment of psoriatic arthritis comprises one or more sgRNAs targeting exon 11 of eIL1RAP. In some embodiments, the CRISPR gene-editing system for the treatment of psoriatic arthritis comprises one or more sgRNAs targeting exon 12 of eIL1RAP. In some embodiments, the CRISPR gene-editing system for the treatment of psoriatic arthritis comprises one or more sgRNAs targeting exon 13 of eIL1RAP. In some embodiments, the CRISPR gene-editing system for the treatment of PsA comprising one or more sgRNAs targeting an exon of eIL1RAP is delivered via one or more lipid nanoparticles (LNPs), the LNPs comprising an LNP system described herein, e.g., and without limitation, any one of LNP systems LNP001 to LNP240.

[0342] In some embodiments, the CRISPR gene-editing system for the treatment of psoriatic arthritis comprises one or more sgRNAs targeting exon 1 of fIL1RAP. In some embodiments, the CRISPR gene-editing system for the treatment of psoriatic arthritis comprises one or more sgRNAs targeting exon 2 of fIL1RAP. In some embodiments, the CRISPR gene-editing system for the treatment of psoriatic arthritis comprises one or more sgRNAs targeting exon 3 of fIL1RAP. In some embodiments, the CRISPR gene-editing system for the treatment of psoriatic arthritis comprises one or more sgRNAs targeting exon 4 of fIL1RAP. In some embodiments, the CRISPR gene-editing system for the treatment of psoriatic arthritis comprises one or more sgRNAs targeting exon 5 of fIL1RAP. In some embodiments, the CRISPR gene-editing system for the treatment of psoriatic arthritis comprises one or more sgRNAs targeting exon 6 of fIL1RAP. In some embodiments, the CRISPR gene-editing system for the treatment of psoriatic arthritis comprises one or more sgRNAs targeting exon 7 of fIL1RAP. In some embodiments, the CRISPR gene-editing system for the treatment of psoriatic arthritis comprises one or more sgRNAs targeting exon 8 of fIL1RAP. In some embodiments, the CRISPR gene-editing system for the treatment of psoriatic arthritis comprises one or more sgRNAs targeting exon 9 of fIL1RAP. In some embodiments, the CRISPR gene-editing system for the treatment of psoriatic arthritis comprises one or more sgRNAs targeting exon 10 of fIL1RAP. In some embodiments, the CRISPR gene-editing system for the treatment of psoriatic arthritis comprises one or more sgRNAs targeting exon 11 of fIL1RAP. In some embodiments, the CRISPR gene-editing system for the treatment of psoriatic arthritis comprises one or more sgRNAs targeting exon 12 of fIL1RAP. In some embodiments, the CRISPR gene-editing system for the treatment of psoriatic arthritis comprises one or more sgRNAs targeting exon 13 of fIL1RAP. In some embodiments, the CRISPR gene-editing system for the treatment of psoriatic arthritis comprises one or more sgRNAs targeting exon 14 of fIL1RAP. In some embodiments, the CRISPR gene-editing system for the treatment of PsA comprising one or more sgRNAs targeting an exon of fIL1RAP is delivered via one or more lipid nanoparticles (LNPs), the LNPs comprising an LNP system described herein, e.g., and without limitation, any one of LNP systems LNP001 to LNP240.

[0343] In some embodiments, the CRISPR gene-editing system for the treatment of psoriatic arthritis comprises one or more sgRNAs targeting TGFBR1. In some embodiments, the CRISPR gene-editing system for the treatment of psoriatic arthritis comprises one or more sgRNAs targeting hTGFBR1. In some embodiments, the CRISPR gene-editing system for the treatment of psoriatic arthritis comprises one or more sgRNAs targeting cTGFBR1. In some embodiments, the CRISPR gene-editing system for the treatment of psoriatic arthritis comprises one or more sgRNAs targeting e TGFBR1. In some embodiments, the CRISPR gene-editing system for the treatment of psoriatic arthritis comprises one or more sgRNAs targeting fTGFBR1. In some embodiments, the CRISPR gene-editing system for the treatment of PsA comprising one or more sgRNAs targeting an exon of TGFBR1 is delivered via one or more lipid nanoparticles (LNPs), the LNPs comprising an LNP system described herein, e.g., and without limitation, any one of LNP systems LNP001 to LNP240.

[0344] In some embodiments, the CRISPR gene-editing system for the treatment of psoriatic arthritis comprises one or more sgRNAs targeting exon 1 of hTGFBR1. In some embodiments, the CRISPR gene-editing system for the treatment of psoriatic arthritis comprises one or more sgRNAs targeting exon 2 of hTGFBR1. In some embodiments, the CRISPR gene-editing system for the treatment of psoriatic arthritis comprises one or more sgRNAs targeting exon 3 of hTGFBR1. In some embodiments, the CRISPR gene-editing system for the treatment of psoriatic arthritis comprises one or more sgRNAs targeting exon 4 of hTGFBR1. In some embodiments, the CRISPR gene-editing system for the treatment of psoriatic arthritis comprises one or more sgRNAs targeting exon 5 of hTGFBR1. In some embodiments, the CRISPR gene-editing system for the treatment of psoriatic arthritis comprises one or more sgRNAs targeting exon 6 of hTGFBR1. In some embodiments, the CRISPR gene-editing system for the treatment of psoriatic arthritis comprises one or more sgRNAs targeting exon 7 of hTGFBR1. In some embodiments, the CRISPR gene-editing system for the treatment of psoriatic arthritis comprises one or more sgRNAs targeting exon 8 of hTGFBR1. In some embodiments, the CRISPR gene-editing system for the treatment of psoriatic arthritis comprises one or more sgRNAs targeting exon 9 of hTGFBR1. In some embodiments, the CRISPR gene-editing system for the treatment of psoriatic arthritis comprises one or more sgRNAs targeting exon 10 of hTGFBR1. In some embodiments, the CRISPR gene-editing system for the treatment of psoriatic arthritis comprises one or more sgRNAs targeting exon 11 of hTGFBR1. In some embodiments, the CRISPR gene-editing system for the treatment of PsA comprising one or more sgRNAs targeting an exon of hTGFBR1 is delivered via one or more lipid nanoparticles (LNPs), the LNPs comprising an LNP system described herein, e.g., and without limitation, any one of LNP systems LNP001 to LNP240.

[0345] In some embodiments, the CRISPR gene-editing system for the treatment of psoriatic arthritis comprises one or more sgRNAs targeting exon 1 of cTGFBR1. In some embodiments, the CRISPR gene-editing system for the treatment of psoriatic arthritis comprises one or more sgRNAs targeting exon 2 of cTGFBR1. In some embodiments, the CRISPR gene-editing system for the treatment of psoriatic arthritis comprises one or more sgRNAs targeting exon 3 of cTGFBR1. In some embodiments, the CRISPR gene-editing system for the treatment of psoriatic arthritis comprises one or more sgRNAs targeting exon 4 of cTGFBR1. In some embodiments, the CRISPR gene-editing system for the treatment of psoriatic arthritis comprises one or more sgRNAs targeting exon 5 of cTGFBR1. In some embodiments, the CRISPR gene-editing system for the treatment of psoriatic arthritis comprises one or more sgRNAs targeting exon 6 of cTGFBR1. In some embodiments, the CRISPR gene-editing system for the treatment of psoriatic arthritis comprises one or more sgRNAs targeting exon 7 of cTGFBR1. In some embodiments, the CRISPR gene-editing system for the treatment of psoriatic arthritis comprises one or more sgRNAs targeting exon 8 of cTGFBR1. In some embodiments, the CRISPR gene-editing system for the treatment of psoriatic arthritis comprises one or more sgRNAs targeting exon 9 of cTGFBR1. In some embodiments, the CRISPR gene-editing system for the treatment of PsA comprising one or more sgRNAs targeting an exon of cTGFBR1 is delivered via one or more lipid nanoparticles (LNPs), the LNPs comprising an LNP system described herein, e.g., and without limitation, any one of LNP systems LNP001 to LNP240.

[0346] In some embodiments, the CRISPR gene-editing system for the treatment of psoriatic arthritis comprises one or more sgRNAs targeting exon 1 of eTGFBR1. In some embodiments, the CRISPR gene-editing system for the treatment of psoriatic arthritis comprises one or more sgRNAs targeting exon 2 of eTGFBR1. In some embodiments, the CRISPR gene-editing system for the treatment of psoriatic arthritis comprises one or more sgRNAs targeting exon 3 of eTGFBR1. In some embodiments, the CRISPR gene-editing system for the treatment of psoriatic arthritis comprises one or more sgRNAs targeting exon 4 of eTGFBR1. In some embodiments, the CRISPR gene-editing system for the treatment of psoriatic arthritis comprises one or more sgRNAs targeting exon 5 of eTGFBR1. In some embodiments, the CRISPR gene-editing system for the treatment of psoriatic arthritis comprises one or more sgRNAs targeting exon 6 of eTGFBR1. In some embodiments, the CRISPR gene-editing system for the treatment of psoriatic arthritis comprises one or more sgRNAs targeting exon 7 of eTGFBR1. In some embodiments, the CRISPR gene-editing system for the treatment of psoriatic arthritis comprises one or more sgRNAs targeting exon 8 of eTGFBR1. In some embodiments, the CRISPR gene-editing system for the treatment of psoriatic arthritis comprises one or more sgRNAs targeting exon 9 of eTGFBR1. In some embodiments, the CRISPR gene-editing system for the treatment of psoriatic arthritis comprises one or more sgRNAs targeting exon 10 of eTGFBR1. In some embodiments, the CRISPR gene-editing system for the treatment of psoriatic arthritis comprises one or more sgRNAs targeting exon 11 of eTGFBR1. In some embodiments, the CRISPR gene-editing system for the treatment of psoriatic arthritis comprises one or more sgRNAs targeting exon 12 of eTGFBR1. In some embodiments, the CRISPR gene-editing system for the treatment of PsA comprising one or more sgRNAs targeting an exon of eTGFBR1 is delivered via one or more lipid nanoparticles (LNPs), the LNPs comprising an LNP system described herein, e.g., and without limitation, any one of LNP systems LNP001 to LNP240.

[0347] In some embodiments, the CRISPR gene-editing system for the treatment of psoriatic arthritis comprises one or more sgRNAs targeting exon 1 of fTGFBR1. In some embodiments, the CRISPR gene-editing system for the treatment of psoriatic arthritis comprises one or more sgRNAs targeting exon 2 of fTGFBR1. In some embodiments, the CRISPR gene-editing system for the treatment of psoriatic arthritis comprises one or more sgRNAs targeting exon 3 of fTGFBR1. In some embodiments, the CRISPR gene-editing system for the treatment of psoriatic arthritis comprises one or more sgRNAs targeting exon 4 of fTGFBR1. In some embodiments, the CRISPR gene-editing system for the treatment of psoriatic arthritis comprises one or more sgRNAs targeting exon 5 of fTGFBR1. In some embodiments, the CRISPR gene-editing system for the treatment of psoriatic arthritis comprises one or more sgRNAs targeting exon 6 of fTGFBR1. In some embodiments, the CRISPR gene-editing system for the treatment of psoriatic arthritis comprises one or more sgRNAs targeting exon 7 of fTGFBR1. In some embodiments, the CRISPR gene-editing system for the treatment of psoriatic arthritis comprises one or more sgRNAs targeting exon 8 of fTGFBR1. In some embodiments, the CRISPR gene-editing system for the treatment of psoriatic arthritis comprises one or more sgRNAs targeting exon 9 of fTGFBR1. In some embodiments, the CRISPR gene-editing system for the treatment of psoriatic arthritis comprises one or more sgRNAs targeting exon 10 of fTGFBR1. In some embodiments, the CRISPR gene-editing system for the treatment of psoriatic arthritis comprises one or more sgRNAs targeting exon 11 of fTGFBR1. In some embodiments, the CRISPR gene-editing system for the treatment of PsA comprising one or more sgRNAs targeting an exon of fTGFBR1 is delivered via one or more lipid nanoparticles (LNPs), the LNPs comprising an LNP system described herein, e.g., and without limitation, any one of LNP systems LNP001 to LNP240.

[0348] In some embodiments, the CRISPR gene-editing system for the treatment of psoriatic arthritis comprises one or more sgRNAs targeting TGFBR2. In some embodiments, the CRISPR gene-editing system for the treatment of psoriatic arthritis comprises one or more sgRNAs targeting hTGFBR2. In some embodiments, the CRISPR gene-editing system for the treatment of psoriatic arthritis comprises one or more sgRNAs targeting cTGFBR2. In some embodiments, the CRISPR gene-editing system for the treatment of psoriatic arthritis comprises one or more sgRNAs targeting eTGFBR2. In some embodiments, the CRISPR gene-editing system for the treatment of psoriatic arthritis comprises one or more sgRNAs targeting fTGFBR2. In some embodiments, the CRISPR gene-editing system for the treatment of PsA comprising one or more sgRNAs targeting an exon of TGFBR2 is delivered via one or more lipid nanoparticles (LNPs), the LNPs comprising an LNP system described herein, e.g., and without limitation, any one of LNP systems LNP001 to LNP240.

[0349] In some embodiments, the CRISPR gene-editing system for the treatment of psoriatic arthritis comprises one or more sgRNAs targeting exon 1 of hTGFBR2. In some embodiments, the CRISPR gene-editing system for the treatment of psoriatic arthritis comprises one or more sgRNAs targeting exon 2 of hTGFBR2. In some embodiments, the CRISPR gene-editing system for the treatment of psoriatic arthritis comprises one or more sgRNAs targeting exon 3 of hTGFBR2. In some embodiments, the CRISPR gene-editing system for the treatment of psoriatic arthritis comprises one or more sgRNAs targeting exon 4 of hTGFBR2. In some embodiments, the CRISPR gene-editing system for the treatment of psoriatic arthritis comprises one or more sgRNAs targeting exon 5 of hTGFBR2. In some embodiments, the CRISPR gene-editing system for the treatment of psoriatic arthritis comprises one or more sgRNAs targeting exon 6 of hTGFBR2. In some embodiments, the CRISPR gene-editing system for the treatment of psoriatic arthritis comprises one or more sgRNAs targeting exon 7 of hTGFBR2. In some embodiments, the CRISPR gene-editing system for the treatment of psoriatic arthritis comprises one or more sgRNAs targeting exon 8 of hTGFBR2. In some embodiments, the CRISPR gene-editing system for the treatment of psoriatic arthritis comprises one or more sgRNAs targeting exon 9 of hTGFBR2. In some embodiments, the CRISPR gene-editing system for the treatment of PsA comprising one or more sgRNAs targeting an exon of hTGFBR2 is delivered via one or more lipid nanoparticles (LNPs), the LNPs comprising an LNP system described herein, e.g., and without limitation, any one of LNP systems LNP001 to LNP240.

[0350] In some embodiments, the CRISPR gene-editing system for the treatment of psoriatic arthritis comprises one or more sgRNAs targeting exon 1 of cTGFBR2. In some embodiments, the CRISPR gene-editing system for the treatment of psoriatic arthritis comprises one or more sgRNAs targeting exon 2 of cTGFBR2. In some embodiments, the CRISPR gene-editing system for the treatment of psoriatic arthritis comprises one or more sgRNAs targeting exon 3 of cTGFBR2. In some embodiments, the CRISPR gene-editing system for the treatment of psoriatic arthritis comprises one or more sgRNAs targeting exon 4 of cTGFBR2. In some embodiments, the CRISPR gene-editing system for the treatment of psoriatic arthritis comprises one or more sgRNAs targeting exon 5 of cTGFBR2. In some embodiments, the CRISPR gene-editing system for the treatment of psoriatic arthritis comprises one or more sgRNAs targeting exon 6 of cTGFBR2. In some embodiments, the CRISPR gene-editing system for the treatment of psoriatic arthritis comprises one or more sgRNAs targeting exon 7 of cTGFBR2. In some embodiments, the CRISPR gene-editing system for the treatment of psoriatic arthritis comprises one or more sgRNAs targeting exon 8 of cTGFBR2. In some embodiments, the CRISPR gene-editing system for the treatment of PsA comprising one or more sgRNAs targeting an exon of cTGFBR2 is delivered via one or more lipid nanoparticles (LNPs), the LNPs comprising an LNP system described herein, e.g., and without limitation, any one of LNP systems LNP001 to LNP240.

[0351] In some embodiments, the CRISPR gene-editing system for the treatment of psoriatic arthritis comprises one or more sgRNAs targeting exon 1 of eTGFBR2. In some embodiments, the CRISPR gene-editing system for the treatment of psoriatic arthritis comprises one or more sgRNAs targeting exon 2 of eTGFBR2. In some embodiments, the CRISPR gene-editing system for the treatment of psoriatic arthritis comprises one or more sgRNAs targeting exon 3 of eTGFBR2. In some embodiments, the CRISPR gene-editing system for the treatment of psoriatic arthritis comprises one or more sgRNAs targeting exon 4 of eTGFBR2. In some embodiments, the CRISPR gene-editing system for the treatment of psoriatic arthritis comprises one or more sgRNAs targeting exon 5 of eTGFBR2. In some embodiments, the CRISPR gene-editing system for the treatment of psoriatic arthritis comprises one or more sgRNAs targeting exon 6 of eTGFBR2. In some embodiments, the CRISPR gene-editing system for the treatment of psoriatic arthritis comprises one or more sgRNAs targeting exon 7 of eTGFBR2. In some embodiments, the CRISPR gene-editing system for the treatment of psoriatic arthritis comprises one or more sgRNAs targeting exon 8 of eTGFBR2. In some embodiments, the CRISPR gene-editing system for the treatment of psoriatic arthritis comprises one or more sgRNAs targeting exon 9 of eTGFBR2. In some embodiments, the CRISPR gene-editing system for the treatment of psoriatic arthritis comprises one or more sgRNAs targeting exon 10 of eTGFBR2. In some embodiments, the CRISPR gene-editing system for the treatment of PsA comprising one or more sgRNAs targeting an exon of eTGFBR2 is delivered via one or more lipid nanoparticles (LNPs), the LNPs comprising an LNP system described herein, e.g., and without limitation, any one of LNP systems LNP001 to LNP240.

[0352] In some embodiments, the CRISPR gene-editing system for the treatment of psoriatic arthritis comprises one or more sgRNAs targeting exon 1 of fTGFBR2. In some embodiments, the CRISPR gene-editing system for the treatment of psoriatic arthritis comprises one or more sgRNAs targeting exon 2 of fTGFBR2. In some embodiments, the CRISPR gene-editing system for the treatment of psoriatic arthritis comprises one or more sgRNAs targeting exon 3 of fTGFBR2. In some embodiments, the CRISPR gene-editing system for the treatment of psoriatic arthritis comprises one or more sgRNAs targeting exon 4 of fTGFBR2. In some embodiments, the CRISPR gene-editing system for the treatment of psoriatic arthritis comprises one or more sgRNAs targeting exon 5 of fTGFBR2. In some embodiments, the CRISPR gene-editing system for the treatment of psoriatic arthritis comprises one or more sgRNAs targeting exon 6 of fTGFBR2. In some embodiments, the CRISPR gene-editing system for the treatment of psoriatic arthritis comprises one or more sgRNAs targeting exon 7 of fTGFBR2. In some embodiments, the CRISPR gene-editing system for the treatment of psoriatic arthritis comprises one or more sgRNAs targeting exon 8 of fTGFBR2. In some embodiments, the CRISPR gene-editing system for the treatment of PsA comprising one or more sgRNAs targeting an exon of fTGFBR2 is delivered via one or more lipid nanoparticles (LNPs), the LNPs comprising an LNP system described herein, e.g., and without limitation, any one of LNP systems LNP001 to LNP240.

[0353] In some embodiments, the CRISPR gene-editing system for the treatment of psoriatic arthritis comprises one or more sgRNAs targeting IL6R. In some embodiments, the CRISPR gene-editing system for the treatment of psoriatic arthritis comprises one or more sgRNAs targeting hIL6R. In some embodiments, the CRISPR gene-editing system for the treatment of psoriatic arthritis comprises one or more sgRNAs targeting cIL6R. In some embodiments, the CRISPR gene-editing system for the treatment of psoriatic arthritis comprises one or more sgRNAs targeting eIL6R. In some embodiments, the CRISPR gene-editing system for the treatment of psoriatic arthritis comprises one or more sgRNAs targeting fIL6R. In some embodiments, the CRISPR gene-editing system for the treatment of PsA comprising one or more sgRNAs targeting an exon of IL6R is delivered via one or more lipid nanoparticles (LNPs), the LNPs comprising an LNP system described herein, e.g., and without limitation, any one of LNP systems LNP001 to LNP240.

[0354] In some embodiments, the CRISPR gene-editing system for the treatment of psoriatic arthritis comprises one or more sgRNAs targeting exon 1 of hIL6R. In some embodiments, the CRISPR gene-editing system for the treatment of psoriatic arthritis comprises one or more sgRNAs targeting exon 2 of hIL6R. In some embodiments, the CRISPR gene-editing system for the treatment of psoriatic arthritis comprises one or more sgRNAs targeting exon 3 of hIL6R. In some embodiments, the CRISPR gene-editing system for the treatment of psoriatic arthritis comprises one or more sgRNAs targeting exon 4 of hIL6R. In some embodiments, the CRISPR gene-editing system for the treatment of psoriatic arthritis comprises one or more sgRNAs targeting exon 5 of hIL6R. In some embodiments, the CRISPR gene-editing system for the treatment of psoriatic arthritis comprises one or more sgRNAs targeting exon 6 of hIL6R. In some embodiments, the CRISPR gene-editing system for the treatment of psoriatic arthritis comprises one or more sgRNAs targeting exon 7 of hIL6R. In some embodiments, the CRISPR gene-editing system for the treatment of psoriatic arthritis comprises one or more sgRNAs targeting exon 8 of hIL6R. In some embodiments, the CRISPR gene-editing system for the treatment of psoriatic arthritis comprises one or more sgRNAs targeting exon 9 of hIL6R. In some embodiments, the CRISPR gene-editing system for the treatment of psoriatic arthritis comprises one or more sgRNAs targeting exon 10 of hIL6R. In some embodiments, the CRISPR gene-editing system for the treatment of psoriatic arthritis comprises one or more sgRNAs targeting exon 11 of hIL6R In some embodiments, the CRISPR gene-editing system for the treatment of psoriatic arthritis comprises one or more sgRNAs targeting exon 12 of hIL6R. In some embodiments, the CRISPR gene-editing system for the treatment of psoriatic arthritis comprises one or more sgRNAs targeting exon 13 of hIL6R. In some embodiments, the CRISPR gene-editing system for the treatment of psoriatic arthritis comprises one or more sgRNAs targeting exon 14 of hIL6R. In some embodiments, the CRISPR gene-editing system for the treatment of psoriatic arthritis comprises one or more sgRNAs targeting exon 15 of hIL6R. In some embodiments, the CRISPR gene-editing system for the treatment of PsA comprising one or more sgRNAs targeting an exon of hIL6R is delivered via one or more lipid nanoparticles (LNPs), the LNPs comprising an LNP system described herein, e.g., and without limitation, any one of LNP systems LNP001 to LNP240.

[0355] In some embodiments, the CRISPR gene-editing system for the treatment of psoriatic arthritis comprises one or more sgRNAs targeting exon 1 of cIL6R. In some embodiments, the CRISPR gene-editing system for the treatment of psoriatic arthritis comprises one or more sgRNAs targeting exon 2 of cIL6R. In some embodiments, the CRISPR gene-editing system for the treatment of psoriatic arthritis comprises one or more sgRNAs targeting exon 3 of cIL6R. In some embodiments, the CRISPR gene-editing system for the treatment of psoriatic arthritis comprises one or more sgRNAs targeting exon 4 of cIL6R. In some embodiments, the CRISPR gene-editing system for the treatment of psoriatic arthritis comprises one or more sgRNAs targeting exon 5 of cIL6R. In some embodiments, the CRISPR gene-editing system for the treatment of psoriatic arthritis comprises one or more sgRNAs targeting exon 6 of cIL6R. In some embodiments, the CRISPR gene-editing system for the treatment of psoriatic arthritis comprises one or more sgRNAs targeting exon 7 of cIL6R. In some embodiments, the CRISPR gene-editing system for the treatment of psoriatic arthritis comprises one or more sgRNAs targeting exon 8 of cIL6R. In some embodiments, the CRISPR gene-editing system for the treatment of psoriatic arthritis comprises one or more sgRNAs targeting exon 9 of cIL6R. In some embodiments, the CRISPR gene-editing system for the treatment of psoriatic arthritis comprises one or more sgRNAs targeting exon 10 of cIL6R. In some embodiments, the CRISPR gene-editing system for the treatment of psoriatic arthritis comprises one or more sgRNAs targeting exon 11 of cIL6R. In some embodiments, the CRISPR gene-editing system for the treatment of psoriatic arthritis comprises one or more sgRNAs targeting exon 12 of cIL6R. In some embodiments, the CRISPR gene-editing system for the treatment of psoriatic arthritis comprises one or more sgRNAs targeting exon 13 of cIL6R. In some embodiments, the CRISPR gene-editing system for the treatment of PsA comprising one or more sgRNAs targeting an exon of cIL6R is delivered via one or more lipid nanoparticles (LNPs), the LNPs comprising an LNP system described herein, e.g., and without limitation, any one of LNP systems LNP001 to LNP240.

[0356] In some embodiments, the CRISPR gene-editing system for the treatment of psoriatic arthritis comprises one or more sgRNAs targeting exon 1 of eIL6R. In some embodiments, the CRISPR gene-editing system for the treatment of psoriatic arthritis comprises one or more sgRNAs targeting exon 2 of eIL6R. In some embodiments, the CRISPR gene-editing system for the treatment of psoriatic arthritis comprises one or more sgRNAs targeting exon 3 of eIL6R. In some embodiments, the CRISPR gene-editing system for the treatment of psoriatic arthritis comprises one or more sgRNAs targeting exon 4 of eIL6R. In some embodiments, the CRISPR gene-editing system for the treatment of psoriatic arthritis comprises one or more sgRNAs targeting exon 5 of eIL6R. In some embodiments, the CRISPR gene-editing system for the treatment of psoriatic arthritis comprises one or more sgRNAs targeting exon 6 of eIL6R. In some embodiments, the CRISPR gene-editing system for the treatment of psoriatic arthritis comprises one or more sgRNAs targeting exon 7 of eIL6R. In some embodiments, the CRISPR gene-editing system for the treatment of psoriatic arthritis comprises one or more sgRNAs targeting exon 8 of eIL6R. In some embodiments, the CRISPR gene-editing system for the treatment of psoriatic arthritis comprises one or more sgRNAs targeting exon 9 of eIL6R. In some embodiments, the CRISPR gene-editing system for the treatment of psoriatic arthritis comprises one or more sgRNAs targeting exon 10 of eIL6R. In some embodiments, the CRISPR gene-editing system for the treatment of psoriatic arthritis comprises one or more sgRNAs targeting exon 11 of eIL6R. In some embodiments, the CRISPR gene-editing system for the treatment of PsA comprising one or more sgRNAs targeting an exon of eIL6R is delivered via one or more lipid nanoparticles (LNPs), the LNPs comprising an LNP system described herein, e.g., and without limitation, any one of LNP systems LNP001 to LNP240.

[0357] In some embodiments, the CRISPR gene-editing system for the treatment of psoriatic arthritis comprises one or more sgRNAs targeting exon 1 of fIL6R. In some embodiments, the CRISPR gene-editing system for the treatment of psoriatic arthritis comprises one or more sgRNAs targeting exon 2 of fIL6R. In some embodiments, the CRISPR gene-editing system for the treatment of psoriatic arthritis comprises one or more sgRNAs targeting exon 3 of fIL6R. In some embodiments, the CRISPR gene-editing system for the treatment of psoriatic arthritis comprises one or more sgRNAs targeting exon 4 of fIL6R. In some embodiments, the CRISPR gene-editing system for the treatment of psoriatic arthritis comprises one or more sgRNAs targeting exon 5 of fIL6R. In some embodiments, the CRISPR gene-editing system for the treatment of psoriatic arthritis comprises one or more sgRNAs targeting exon 6 of fIL6R. In some embodiments, the CRISPR gene-editing system for the treatment of psoriatic arthritis comprises one or more sgRNAs targeting exon 7 of fIL6R. In some embodiments, the CRISPR gene-editing system for the treatment of psoriatic arthritis comprises one or more sgRNAs targeting exon 8 of fIL6R. In some embodiments, the CRISPR gene-editing system for the treatment of psoriatic arthritis comprises one or more sgRNAs targeting exon 9 of fIL6R. In some embodiments, the CRISPR gene-editing system for the treatment of psoriatic arthritis comprises one or more sgRNAs targeting exon 10 of fIL6R. In some embodiments, the CRISPR gene-editing system for the treatment of PsA comprising one or more sgRNAs targeting an exon of fIL6R is delivered via one or more lipid nanoparticles (LNPs), the LNPs comprising an LNP system described herein, e.g., and without limitation, any one of LNP systems LNP001 to LNP240.

[0358] In some embodiments, the CRISPR gene-editing system for the treatment of psoriatic arthritis comprises one or more sgRNAs targeting IL6ST. In some embodiments, the CRISPR gene-editing system for the treatment of psoriatic arthritis comprises one or more sgRNAs targeting hIL6ST. In some embodiments, the CRISPR gene-editing system for the treatment of psoriatic arthritis comprises one or more sgRNAs targeting cIL6ST. In some embodiments, the CRISPR gene-editing system for the treatment of psoriatic arthritis comprises one or more sgRNAs targeting eIL6ST. In some embodiments, the CRISPR gene-editing system for the treatment of psoriatic arthritis comprises one or more sgRNAs targeting fIL6ST. In some embodiments, the CRISPR gene-editing system for the treatment of PsA comprising one or more sgRNAs targeting an exon of IL6ST is delivered via one or more lipid nanoparticles (LNPs), the LNPs comprising an LNP system described herein, e.g., and without limitation, any one of LNP systems LNP001 to LNP240.

[0359] In some embodiments, the CRISPR gene-editing system for the treatment of psoriatic arthritis comprises one or more sgRNAs targeting exon 1 of hIL6ST. In some embodiments, the CRISPR gene-editing system for the treatment of psoriatic arthritis comprises one or more sgRNAs targeting exon 2 of hIL6ST. In some embodiments, the CRISPR gene-editing system for the treatment of psoriatic arthritis comprises one or more sgRNAs targeting exon 3 of hIL6ST. In some embodiments, the CRISPR gene-editing system for the treatment of psoriatic arthritis comprises one or more sgRNAs targeting exon 4 of hIL6ST. In some embodiments, the CRISPR gene-editing system for the treatment of psoriatic arthritis comprises one or more sgRNAs targeting exon 5 of hIL6ST. In some embodiments, the CRISPR gene-editing system for the treatment of psoriatic arthritis comprises one or more sgRNAs targeting exon 6 of hIL6ST. In some embodiments, the CRISPR gene-editing system for the treatment of psoriatic arthritis comprises one or more sgRNAs targeting exon 7 of hIL6ST. In some embodiments, the CRISPR gene-editing system for the treatment of psoriatic arthritis comprises one or more sgRNAs targeting exon 8 of hIL6ST. In some embodiments, the CRISPR gene-editing system for the treatment of psoriatic arthritis comprises one or more sgRNAs targeting exon 9 of hIL6ST. In some embodiments, the CRISPR gene-editing system for the treatment of psoriatic arthritis comprises one or more sgRNAs targeting exon 10 of hIL6ST. In some embodiments, the CRISPR gene-editing system for the treatment of psoriatic arthritis comprises one or more sgRNAs targeting exon 11 of hIL6ST. In some embodiments, the CRISPR gene-editing system for the treatment of psoriatic arthritis comprises one or more sgRNAs targeting exon 12 of hIL6ST. In some embodiments, the CRISPR gene-editing system for the treatment of psoriatic arthritis comprises one or more sgRNAs targeting exon 13 of hIL6ST. In some embodiments, the CRISPR gene-editing system for the treatment of psoriatic arthritis comprises one or more sgRNAs targeting exon 14 of hIL6ST. In some embodiments, the CRISPR gene-editing system for the treatment of psoriatic arthritis comprises one or more sgRNAs targeting exon 15 of hIL6ST. In some embodiments, the CRISPR gene-editing system for the treatment of psoriatic arthritis comprises one or more sgRNAs targeting exon 16 of hIL6ST. In some embodiments, the CRISPR gene-editing system for the treatment of psoriatic arthritis comprises one or more sgRNAs targeting exon 17 of hIL6ST. In some embodiments, the CRISPR gene-editing system for the treatment of psoriatic arthritis comprises one or more sgRNAs targeting exon 18 of hIL6ST. In some embodiments, the CRISPR gene-editing system for the treatment of psoriatic arthritis comprises one or more sgRNAs targeting exon 19 of hIL6ST. In some embodiments, the CRISPR gene-editing system for the treatment of PsA comprising one or more sgRNAs targeting an exon of hIL6ST is delivered via one or more lipid nanoparticles (LNPs), the LNPs comprising an LNP system described herein, e.g., and without limitation, any one of LNP systems LNP001 to LNP240.

[0360] In some embodiments, the CRISPR gene-editing system for the treatment of psoriatic arthritis comprises one or more sgRNAs targeting exon 1 of cIL6ST. In some embodiments, the CRISPR gene-editing system for the treatment of psoriatic arthritis comprises one or more sgRNAs targeting exon 2 of cIL6ST. In some embodiments, the CRISPR gene-editing system for the treatment of psoriatic arthritis comprises one or more sgRNAs targeting exon 3 of cIL6ST. In some embodiments, the CRISPR gene-editing system for the treatment of psoriatic arthritis comprises one or more sgRNAs targeting exon 4 of cIL6ST. In some embodiments, the CRISPR gene-editing system for the treatment of psoriatic arthritis comprises one or more sgRNAs targeting exon 5 of cIL6ST. In some embodiments, the CRISPR gene-editing system for the treatment of psoriatic arthritis comprises one or more sgRNAs targeting exon 6 of cIL6ST. In some embodiments, the CRISPR gene-editing system for the treatment of psoriatic arthritis comprises one or more sgRNAs targeting exon 7 of cIL6ST. In some embodiments, the CRISPR gene-editing system for the treatment of psoriatic arthritis comprises one or more sgRNAs targeting exon 8 of cIL6ST. In some embodiments, the CRISPR gene-editing system for the treatment of psoriatic arthritis comprises one or more sgRNAs targeting exon 9 of cIL6ST. In some embodiments, the CRISPR gene-editing system for the treatment of psoriatic arthritis comprises one or more sgRNAs targeting exon 10 of cIL6ST. In some embodiments, the CRISPR gene-editing system for the treatment of psoriatic arthritis comprises one or more sgRNAs targeting exon 11 of cIL6ST In some embodiments, the CRISPR gene-editing system for the treatment of psoriatic arthritis comprises one or more sgRNAs targeting exon 12 of cIL6ST. In some embodiments, the CRISPR gene-editing system for the treatment of psoriatic arthritis comprises one or more sgRNAs targeting exon 13 of cIL6ST. In some embodiments, the CRISPR gene-editing system for the treatment of psoriatic arthritis comprises one or more sgRNAs targeting exon 14 of cIL6ST. In some embodiments, the CRISPR gene-editing system for the treatment of psoriatic arthritis comprises one or more sgRNAs targeting exon 15 of cIL6ST. In some embodiments, the CRISPR gene-editing system for the treatment of psoriatic arthritis comprises one or more sgRNAs targeting exon 16 of cIL6ST. In some embodiments, the CRISPR gene-editing system for the treatment of psoriatic arthritis comprises one or more sgRNAs targeting exon 17 of cIL6ST. In some embodiments, the CRISPR gene-editing system for the treatment of psoriatic arthritis comprises one or more sgRNAs targeting exon 18 of cIL6ST. In some embodiments, the CRISPR gene-editing system for the treatment of PsA comprising one or more sgRNAs targeting an exon of cIL6ST is delivered via one or more lipid nanoparticles (LNPs), the LNPs comprising an LNP system described herein, e.g., and without limitation, any one of LNP systems LNP001 to LNP240.

[0361] In some embodiments, the CRISPR gene-editing system for the treatment of psoriatic arthritis comprises one or more sgRNAs targeting exon 1 of eIL6ST. In some embodiments, the CRISPR gene-editing system for the treatment of psoriatic arthritis comprises one or more sgRNAs targeting exon 2 of eIL6ST. In some embodiments, the CRISPR gene-editing system for the treatment of psoriatic arthritis comprises one or more sgRNAs targeting exon 3 of eIL6ST. In some embodiments, the CRISPR gene-editing system for the treatment of psoriatic arthritis comprises one or more sgRNAs targeting exon 4 of eIL6ST. In some embodiments, the CRISPR gene-editing system for the treatment of psoriatic arthritis comprises one or more sgRNAs targeting exon 5 of eIL6ST. In some embodiments, the CRISPR gene-editing system for the treatment of psoriatic arthritis comprises one or more sgRNAs targeting exon 6 of eIL6ST. In some embodiments, the CRISPR gene-editing system for the treatment of psoriatic arthritis comprises one or more sgRNAs targeting exon 7 of eIL6ST. In some embodiments, the CRISPR gene-editing system for the treatment of psoriatic arthritis comprises one or more sgRNAs targeting exon 8 of eIL6ST. In some embodiments, the CRISPR gene-editing system for the treatment of psoriatic arthritis comprises one or more sgRNAs targeting exon 9 of eIL6ST. In some embodiments, the CRISPR gene-editing system for the treatment of psoriatic arthritis comprises one or more sgRNAs targeting exon 10 of eIL6ST. In some embodiments, the CRISPR gene-editing system for the treatment of psoriatic arthritis comprises one or more sgRNAs targeting exon 11 of eIL6ST In some embodiments, the CRISPR gene-editing system for the treatment of psoriatic arthritis comprises one or more sgRNAs targeting exon 12 of eIL6ST. In some embodiments, the CRISPR gene-editing system for the treatment of psoriatic arthritis comprises one or more sgRNAs targeting exon 13 of eIL6ST. In some embodiments, the CRISPR gene-editing system for the treatment of psoriatic arthritis comprises one or more sgRNAs targeting exon 14 of eIL6ST. In some embodiments, the CRISPR gene-editing system for the treatment of psoriatic arthritis comprises one or more sgRNAs targeting exon 15 of eIL6ST. In some embodiments, the CRISPR gene-editing system for the treatment of psoriatic arthritis comprises one or more sgRNAs targeting exon 16 of eIL6ST. In some embodiments, the CRISPR gene-editing system for the treatment of psoriatic arthritis comprises one or more sgRNAs targeting exon 17 of eIL6ST. In some embodiments, the CRISPR gene-editing system for the treatment of psoriatic arthritis comprises one or more sgRNAs targeting exon 18 of eIL6ST. In some embodiments, the CRISPR gene-editing system for the treatment of PsA comprising one or more sgRNAs targeting an exon of eIL6ST is delivered via one or more lipid nanoparticles (LNPs), the LNPs comprising an LNP system described herein, e.g., and without limitation, any one of LNP systems LNP001 to LNP240.

[0362] In some embodiments, the CRISPR gene-editing system for the treatment of psoriatic arthritis comprises one or more sgRNAs targeting exon 1 of fIL6ST. In some embodiments, the CRISPR gene-editing system for the treatment of psoriatic arthritis comprises one or more sgRNAs targeting exon 2 of fIL6ST. In some embodiments, the CRISPR gene-editing system for the treatment of psoriatic arthritis comprises one or more sgRNAs targeting exon 3 of fIL6ST. In some embodiments, the CRISPR gene-editing system for the treatment of psoriatic arthritis comprises one or more sgRNAs targeting exon 4 of fIL6ST. In some embodiments, the CRISPR gene-editing system for the treatment of psoriatic arthritis comprises one or more sgRNAs targeting exon 5 of fIL6ST. In some embodiments, the CRISPR gene-editing system for the treatment of psoriatic arthritis comprises one or more sgRNAs targeting exon 6 of fIL6ST. In some embodiments, the CRISPR gene-editing system for the treatment of psoriatic arthritis comprises one or more sgRNAs targeting exon 7 of fIL6ST. In some embodiments, the CRISPR gene-editing system for the treatment of psoriatic arthritis comprises one or more sgRNAs targeting exon 8 of fIL6ST. In some embodiments, the CRISPR gene-editing system for the treatment of psoriatic arthritis comprises one or more sgRNAs targeting exon 9 of fIL6ST. In some embodiments, the CRISPR gene-editing system for the treatment of psoriatic arthritis comprises one or more sgRNAs targeting exon 10 of fIL6ST. In some embodiments, the CRISPR gene-editing system for the treatment of psoriatic arthritis comprises one or more sgRNAs targeting exon 11 of fIL6ST In some embodiments, the CRISPR gene-editing system for the treatment of psoriatic arthritis comprises one or more sgRNAs targeting exon 12 of fIL6ST. In some embodiments, the CRISPR gene-editing system for the treatment of psoriatic arthritis comprises one or more sgRNAs targeting exon 13 of fIL6ST. In some embodiments, the CRISPR gene-editing system for the treatment of psoriatic arthritis comprises one or more sgRNAs targeting exon 14 of fIL6ST. In some embodiments, the CRISPR gene-editing system for the treatment of psoriatic arthritis comprises one or more sgRNAs targeting exon 15 of fIL6ST. In some embodiments, the CRISPR gene-editing system for the treatment of psoriatic arthritis comprises one or more sgRNAs targeting exon 16 of fIL6ST. In some embodiments, the CRISPR gene-editing system for the treatment of psoriatic arthritis comprises one or more sgRNAs targeting exon 17 of fIL6ST. In some embodiments, the CRISPR gene-editing system for the treatment of psoriatic arthritis comprises one or more sgRNAs targeting exon 18 of fIL6ST. In some embodiments, the CRISPR gene-editing system for the treatment of psoriatic arthritis comprises one or more sgRNAs targeting exon 19 of fIL6ST. In some embodiments, the CRISPR gene-editing system for the treatment of psoriatic arthritis comprises one or more sgRNAs targeting exon 20 of fIL6ST. In some embodiments, the CRISPR gene-editing system for the treatment of PsA comprising one or more sgRNAs targeting an exon of fIL6ST is delivered via one or more lipid nanoparticles (LNPs), the LNPs comprising an LNP system described herein, e.g., and without limitation, any one of LNP systems LNP001 to LNP240.

[0363] In some embodiments, the CRISPR gene-editing system for the treatment of psoriatic arthritis comprises one or more sgRNAs targeting TNFRSF1A. In some embodiments, the CRISPR gene-editing system for the treatment of psoriatic arthritis comprises one or more sgRNAs targeting hTNFRSF1A. In some embodiments, the CRISPR gene-editing system for the treatment of psoriatic arthritis comprises one or more sgRNAs targeting cTNFRSF1A. In some embodiments, the CRISPR gene-editing system for the treatment of psoriatic arthritis comprises one or more sgRNAs targeting eTNFRSF1A. In some embodiments, the CRISPR gene-editing system for the treatment of psoriatic arthritis comprises one or more sgRNAs targeting fTNFRSF1A. In some embodiments, the CRISPR gene-editing system for the treatment of PsA comprising one or more sgRNAs targeting an exon of TNFRSF1A is delivered via one or more lipid nanoparticles (LNPs), the LNPs comprising an LNP system described herein, e.g., and without limitation, any one of LNP systems LNP001 to LNP240.

[0364] In some embodiments, the CRISPR gene-editing system for the treatment of psoriatic arthritis comprises one or more sgRNAs targeting exon 1 of hTNFRSF1A. In some embodiments, the CRISPR gene-editing system for the treatment of psoriatic arthritis comprises one or more sgRNAs targeting exon 2 of hTNFRSF1A. In some embodiments, the CRISPR gene-editing system for the treatment of psoriatic arthritis comprises one or more sgRNAs targeting exon 3 of hTNFRSF1A. In some embodiments, the CRISPR gene-editing system for the treatment of psoriatic arthritis comprises one or more sgRNAs targeting exon 4 of hTNFRSF1A. In some embodiments, the CRISPR gene-editing system for the treatment of psoriatic arthritis comprises one or more sgRNAs targeting exon 5 of hTNFRSF1A. In some embodiments, the CRISPR gene-editing system for the treatment of psoriatic arthritis comprises one or more sgRNAs targeting exon 6 of hTNFRSF1A. In some embodiments, the CRISPR gene-editing system for the treatment of psoriatic arthritis comprises one or more sgRNAs targeting exon 7 of hTNFRSF1A. In some embodiments, the CRISPR gene-editing system for the treatment of psoriatic arthritis comprises one or more sgRNAs targeting exon 8 of hTNFRSF1A. In some embodiments, the CRISPR gene-editing system for the treatment of psoriatic arthritis comprises one or more sgRNAs targeting exon 9 of hTNFRSF1A. In some embodiments, the CRISPR gene-editing system for the treatment of psoriatic arthritis comprises one or more sgRNAs targeting exon 10 of hTNFRSF1A. In some embodiments, the CRISPR gene-editing system for the treatment of psoriatic arthritis comprises one or more sgRNAs targeting exon 11 of hTNFRSF1A. In some embodiments, the CRISPR gene-editing system for the treatment of PsA comprising one or more sgRNAs targeting an exon of hTNFRSF1A is delivered via one or more lipid nanoparticles (LNPs), the LNPs comprising an LNP system described herein, e.g., and without limitation, any one of LNP systems LNP001 to LNP240.

[0365] In some embodiments, the CRISPR gene-editing system for the treatment of psoriatic arthritis comprises one or more sgRNAs targeting exon 1 of cTNFRSF1A. In some embodiments, the CRISPR gene-editing system for the treatment of psoriatic arthritis comprises one or more sgRNAs targeting exon 2 of cTNFRSF1A. In some embodiments, the CRISPR gene-editing system for the treatment of psoriatic arthritis comprises one or more sgRNAs targeting exon 3 of cTNFRSF1A. In some embodiments, the CRISPR gene-editing system for the treatment of psoriatic arthritis comprises one or more sgRNAs targeting exon 4 of cTNFRSF1A. In some embodiments, the CRISPR gene-editing system for the treatment of psoriatic arthritis comprises one or more sgRNAs targeting exon 5 of cTNFRSF1A. In some embodiments, the CRISPR gene-editing system for the treatment of psoriatic arthritis comprises one or more sgRNAs targeting exon 6 of cTNFRSF1A. In some embodiments, the CRISPR gene-editing system for the treatment of psoriatic arthritis comprises one or more sgRNAs targeting exon 7 of cTNFRSF1A. In some embodiments, the CRISPR gene-editing system for the treatment of psoriatic arthritis comprises one or more sgRNAs targeting exon 8 of cTNFRSF1A. In some embodiments, the CRISPR gene-editing system for the treatment of psoriatic arthritis comprises one or more sgRNAs targeting exon 9 of cTNFRSF1A. In some embodiments, the CRISPR gene-editing system for the treatment of psoriatic arthritis comprises one or more sgRNAs targeting exon 10 of cTNFRSF1A. In some embodiments, the CRISPR gene-editing system for the treatment of psoriatic arthritis comprises one or more sgRNAs targeting exon 11 of cTNFRSF1A. In some embodiments, the CRISPR gene-editing system for the treatment of PsA comprising one or more sgRNAs targeting an exon of cTNFRSF1A is delivered via one or more lipid nanoparticles (LNPs), the LNPs comprising an LNP system described herein, e.g., and without limitation, any one of LNP systems LNP001 to LNP240.

[0366] In some embodiments, the CRISPR gene-editing system for the treatment of psoriatic arthritis comprises one or more sgRNAs targeting exon 1 of eTNFRSF1A. In some embodiments, the CRISPR gene-editing system for the treatment of psoriatic arthritis comprises one or more sgRNAs targeting exon 2 of eTNFRSF1A. In some embodiments, the CRISPR gene-editing system for the treatment of psoriatic arthritis comprises one or more sgRNAs targeting exon 3 of eTNFRSF1A. In some embodiments, the CRISPR gene-editing system for the treatment of psoriatic arthritis comprises one or more sgRNAs targeting exon 4 of eTNFRSF1A. In some embodiments, the CRISPR gene-editing system for the treatment of psoriatic arthritis comprises one or more sgRNAs targeting exon 5 of eTNFRSF1A. In some embodiments, the CRISPR gene-editing system for the treatment of psoriatic arthritis comprises one or more sgRNAs targeting exon 6 of eTNFRSF1A. In some embodiments, the CRISPR gene-editing system for the treatment of psoriatic arthritis comprises one or more sgRNAs targeting exon 7 of eTNFRSF1A. In some embodiments, the CRISPR gene-editing system for the treatment of psoriatic arthritis comprises one or more sgRNAs targeting exon 8 of eTNFRSF1A. In some embodiments, the CRISPR gene-editing system for the treatment of psoriatic arthritis comprises one or more sgRNAs targeting exon 9 of eTNFRSF1A. In some embodiments, the CRISPR gene-editing system for the treatment of psoriatic arthritis comprises one or more sgRNAs targeting exon 10 of eTNFRSF1A. In some embodiments, the CRISPR gene-editing system for the treatment of PsA comprising one or more sgRNAs targeting an exon of eTNFRSF1A is delivered via one or more lipid nanoparticles (LNPs), the LNPs comprising an LNP system described herein, e.g., and without limitation, any one of LNP systems LNP001 to LNP240.

[0367] In some embodiments, the CRISPR gene-editing system for the treatment of psoriatic arthritis comprises one or more sgRNAs targeting exon 1 of fTNFRSF1A. In some embodiments, the CRISPR gene-editing system for the treatment of psoriatic arthritis comprises one or more sgRNAs targeting exon 2 of fTNFRSF1A. In some embodiments, the CRISPR gene-editing system for the treatment of psoriatic arthritis comprises one or more sgRNAs targeting exon 3 of fTNFRSF1A. In some embodiments, the CRISPR gene-editing system for the treatment of psoriatic arthritis comprises one or more sgRNAs targeting exon 4 of fTNFRSF1A. In some embodiments, the CRISPR gene-editing system for the treatment of psoriatic arthritis comprises one or more sgRNAs targeting exon 5 of fTNFRSF1A. In some embodiments, the CRISPR gene-editing system for the treatment of psoriatic arthritis comprises one or more sgRNAs targeting exon 6 of fTNFRSF1A. In some embodiments, the CRISPR gene-editing system for the treatment of psoriatic arthritis comprises one or more sgRNAs targeting exon 7 of fTNFRSF1A. In some embodiments, the CRISPR gene-editing system for the treatment of psoriatic arthritis comprises one or more sgRNAs targeting exon 8 of fTNFRSF1A. In some embodiments, the CRISPR gene-editing system for the treatment of psoriatic arthritis comprises one or more sgRNAs targeting exon 9 of fTNFRSF1A. In some embodiments, the CRISPR gene-editing system for the treatment of psoriatic arthritis comprises one or more sgRNAs targeting exon 10 of fTNFRSF1A. In some embodiments, the CRISPR gene-editing system for the treatment of PsA comprising one or more sgRNAs targeting an exon of fTNFRSF1A is delivered via one or more lipid nanoparticles (LNPs), the LNPs comprising an LNP system described herein, e.g., and without limitation, any one of LNP systems LNP001 to LNP240.

[0368] In some embodiments, the CRISPR gene-editing system for the treatment of psoriatic arthritis comprises one or more sgRNAs targeting TNFRSF1B. In some embodiments, the CRISPR gene-editing system for the treatment of psoriatic arthritis comprises one or more sgRNAs targeting hTNFRSF1B. In some embodiments, the CRISPR gene-editing system for the treatment of psoriatic arthritis comprises one or more sgRNAs targeting cTNFRSF1B. In some embodiments, the CRISPR gene-editing system for the treatment of psoriatic arthritis comprises one or more sgRNAs targeting eTNFRSF1B. In some embodiments, the CRISPR gene-editing system for the treatment of psoriatic arthritis comprises one or more sgRNAs targeting fTNFRSF1B. In some embodiments, the CRISPR gene-editing system for the treatment of PsA comprising one or more sgRNAs targeting an exon of TNFRSF1B is delivered via one or more lipid nanoparticles (LNPs), the LNPs comprising an LNP system described herein, e.g., and without limitation, any one of LNP systems LNP001 to LNP240.

[0369] In some embodiments, the CRISPR gene-editing system for the treatment of psoriatic arthritis comprises one or more sgRNAs targeting exon 1 of hTNFRSF1B. In some embodiments, the CRISPR gene-editing system for the treatment of psoriatic arthritis comprises one or more sgRNAs targeting exon 2 of hTNFRSF1B. In some embodiments, the CRISPR gene-editing system for the treatment of psoriatic arthritis comprises one or more sgRNAs targeting exon 3 of hTNFRSF1B. In some embodiments, the CRISPR gene-editing system for the treatment of psoriatic arthritis comprises one or more sgRNAs targeting exon 4 of hTNFRSF1B. In some embodiments, the CRISPR gene-editing system for the treatment of psoriatic arthritis comprises one or more sgRNAs targeting exon 5 of hTNFRSF1B. In some embodiments, the CRISPR gene-editing system for the treatment of psoriatic arthritis comprises one or more sgRNAs targeting exon 6 of hTNFRSF1B. In some embodiments, the CRISPR gene-editing system for the treatment of psoriatic arthritis comprises one or more sgRNAs targeting exon 7 of hTNFRSF1B. In some embodiments, the CRISPR gene-editing system for the treatment of psoriatic arthritis comprises one or more sgRNAs targeting exon 8 of hTNFRSF1B. In some embodiments, the CRISPR gene-editing system for the treatment of psoriatic arthritis comprises one or more sgRNAs targeting exon 9 of hTNFRSF1B. In some embodiments, the CRISPR gene-editing system for the treatment of psoriatic arthritis comprises one or more sgRNAs targeting exon 10 of hTNFRSF1B. In some embodiments, the CRISPR gene-editing system for the treatment of psoriatic arthritis comprises one or more sgRNAs targeting exon 11 of hTNFRSF1B In some embodiments, the CRISPR gene-editing system for the treatment of psoriatic arthritis comprises one or more sgRNAs targeting exon 12 of hTNFRSF1B. In some embodiments, the CRISPR gene-editing system for the treatment of psoriatic arthritis comprises one or more sgRNAs targeting exon 13 of hTNFRSF1B. In some embodiments, the CRISPR gene-editing system for the treatment of PsA comprising one or more sgRNAs targeting an exon of hTNFRSF1B is delivered via one or more lipid nanoparticles (LNPs), the LNPs comprising an LNP system described herein, e.g., and without limitation, any one of LNP systems LNP001 to LNP240.

[0370] In some embodiments, the CRISPR gene-editing system for the treatment of psoriatic arthritis comprises one or more sgRNAs targeting exon 1 of cTNFRSF1B. In some embodiments, the CRISPR gene-editing system for the treatment of psoriatic arthritis comprises one or more sgRNAs targeting exon 2 of cTNFRSF1B. In some embodiments, the CRISPR gene-editing system for the treatment of psoriatic arthritis comprises one or more sgRNAs targeting exon 3 of cTNFRSF1B. In some embodiments, the CRISPR gene-editing system for the treatment of psoriatic arthritis comprises one or more sgRNAs targeting exon 4 of cTNFRSF1B. In some embodiments, the CRISPR gene-editing system for the treatment of psoriatic arthritis comprises one or more sgRNAs targeting exon 5 of cTNFRSF1B. In some embodiments, the CRISPR gene-editing system for the treatment of psoriatic arthritis comprises one or more sgRNAs targeting exon 6 of cTNFRSF1B. In some embodiments, the CRISPR gene-editing system for the treatment of psoriatic arthritis comprises one or more sgRNAs targeting exon 7 of cTNFRSF1B. In some embodiments, the CRISPR gene-editing system for the treatment of psoriatic arthritis comprises one or more sgRNAs targeting exon 8 of cTNFRSF1B. In some embodiments, the CRISPR gene-editing system for the treatment of psoriatic arthritis comprises one or more sgRNAs targeting exon 9 of cTNFRSF1B. In some embodiments, the CRISPR gene-editing system for the treatment of psoriatic arthritis comprises one or more sgRNAs targeting exon 10 of cTNFRSF1B. In some embodiments, the CRISPR gene-editing system for the treatment of psoriatic arthritis comprises one or more sgRNAs targeting exon 11 of cTNFRSF1B. In some embodiments, the CRISPR gene-editing system for the treatment of PsA comprising one or more sgRNAs targeting an exon of cTNFRSF1B is delivered via one or more lipid nanoparticles (LNPs), the LNPs comprising an LNP system described herein, e.g., and without limitation, any one of LNP systems LNP001 to LNP240.

[0371] In some embodiments, the CRISPR gene-editing system for the treatment of psoriatic arthritis comprises one or more sgRNAs targeting exon 1 of eTNFRSF1B. In some embodiments, the CRISPR gene-editing system for the treatment of psoriatic arthritis comprises one or more sgRNAs targeting exon 2 of eTNFRSF1B. In some embodiments, the CRISPR gene-editing system for the treatment of psoriatic arthritis comprises one or more sgRNAs targeting exon 3 of eTNFRSF1B. In some embodiments, the CRISPR gene-editing system for the treatment of psoriatic arthritis comprises one or more sgRNAs targeting exon 4 of eTNFRSF1B. In some embodiments, the CRISPR gene-editing system for the treatment of psoriatic arthritis comprises one or more sgRNAs targeting exon 5 of eTNFRSF1B. In some embodiments, the CRISPR gene-editing system for the treatment of psoriatic arthritis comprises one or more sgRNAs targeting exon 6 of eTNFRSF1B. In some embodiments, the CRISPR gene-editing system for the treatment of psoriatic arthritis comprises one or more sgRNAs targeting exon 7 of eTNFRSF1B. In some embodiments, the CRISPR gene-editing system for the treatment of psoriatic arthritis comprises one or more sgRNAs targeting exon 8 of eTNFRSF1B. In some embodiments, the CRISPR gene-editing system for the treatment of psoriatic arthritis comprises one or more sgRNAs targeting exon 9 of eTNFRSF1B. In some embodiments, the CRISPR gene-editing system for the treatment of psoriatic arthritis comprises one or more sgRNAs targeting exon 10 of eTNFRSF1B. In some embodiments, the CRISPR gene-editing system for the treatment of psoriatic arthritis comprises one or more sgRNAs targeting exon 11 of eTNFRSF1B. In some embodiments, the CRISPR gene-editing system for the treatment of PsA comprising one or more sgRNAs targeting an exon of eTNFRSF1B is delivered via one or more lipid nanoparticles (LNPs), the LNPs comprising an LNP system described herein, e.g., and without limitation, any one of LNP systems LNP001 to LNP240.

[0372] In some embodiments, the CRISPR gene-editing system for the treatment of psoriatic arthritis comprises one or more sgRNAs targeting exon 1 of fTNFRSF1B. In some embodiments, the CRISPR gene-editing system for the treatment of psoriatic arthritis comprises one or more sgRNAs targeting exon 2 of fTNFRSF1B. In some embodiments, the CRISPR gene-editing system for the treatment of psoriatic arthritis comprises one or more sgRNAs targeting exon 3 of fTNFRSF1B. In some embodiments, the CRISPR gene-editing system for the treatment of psoriatic arthritis comprises one or more sgRNAs targeting exon 4 of fTNFRSF1B. In some embodiments, the CRISPR gene-editing system for the treatment of psoriatic arthritis comprises one or more sgRNAs targeting exon 5 of fTNFRSF1B. In some embodiments, the CRISPR gene-editing system for the treatment of psoriatic arthritis comprises one or more sgRNAs targeting exon 6 of fTNFRSF1B. In some embodiments, the CRISPR gene-editing system for the treatment of psoriatic arthritis comprises one or more sgRNAs targeting exon 7 of fTNFRSF1B. In some embodiments, the CRISPR gene-editing system for the treatment of psoriatic arthritis comprises one or more sgRNAs targeting exon 8 of fTNFRSF1B. In some embodiments, the CRISPR gene-editing system for the treatment of psoriatic arthritis comprises one or more sgRNAs targeting exon 9 of fTNFRSF1B. In some embodiments, the CRISPR gene-editing system for the treatment of psoriatic arthritis comprises one or more sgRNAs targeting exon 10 of fTNFRSF1B. In some embodiments, the CRISPR gene-editing system for the treatment of PsA comprising one or more sgRNAs targeting an exon of fTNFRSF1B is delivered via one or more lipid nanoparticles (LNPs), the LNPs comprising an LNP system described herein, e.g., and without limitation, any one of LNP systems LNP001 to LNP240.

[0373] In some embodiments, the CRISPR gene-editing system for the treatment of psoriatic arthritis comprises one or more sgRNAs targeting TNFRSF3. In some embodiments, the CRISPR gene-editing system for the treatment of psoriatic arthritis comprises one or more sgRNAs targeting hTNFRSF3. In some embodiments, the CRISPR gene-editing system for the treatment of psoriatic arthritis comprises one or more sgRNAs targeting cTNFRSF3. In some embodiments, the CRISPR gene-editing system for the treatment of psoriatic arthritis comprises one or more sgRNAs targeting eTNFRSF3. In some embodiments, the CRISPR gene-editing system for the treatment of psoriatic arthritis comprises one or more sgRNAs targeting fTNFRSF3. In some embodiments, the CRISPR gene-editing system for the treatment of PsA comprising one or more sgRNAs targeting an exon of TNFRSF3 is delivered via one or more lipid nanoparticles (LNPs), the LNPs comprising an LNP system described herein, e.g., and without limitation, any one of LNP systems LNP001 to LNP240.

[0374] In some embodiments, the CRISPR gene-editing system for the treatment of psoriatic arthritis comprises one or more sgRNAs targeting exon 1 of hTNFRSF3. In some embodiments, the CRISPR gene-editing system for the treatment of psoriatic arthritis comprises one or more sgRNAs targeting exon 2 of hTNFRSF3. In some embodiments, the CRISPR gene-editing system for the treatment of psoriatic arthritis comprises one or more sgRNAs targeting exon 3 of hTNFRSF3. In some embodiments, the CRISPR gene-editing system for the treatment of psoriatic arthritis comprises one or more sgRNAs targeting exon 4 of hTNFRSF3. In some embodiments, the CRISPR gene-editing system for the treatment of psoriatic arthritis comprises one or more sgRNAs targeting exon 5 of hTNFRSF3. In some embodiments, the CRISPR gene-editing system for the treatment of psoriatic arthritis comprises one or more sgRNAs targeting exon 6 of hTNFRSF3. In some embodiments, the CRISPR gene-editing system for the treatment of psoriatic arthritis comprises one or more sgRNAs targeting exon 7 of hTNFRSF3. In some embodiments, the CRISPR gene-editing system for the treatment of psoriatic arthritis comprises one or more sgRNAs targeting exon 8 of hTNFRSF3. In some embodiments, the CRISPR gene-editing system for the treatment of psoriatic arthritis comprises one or more sgRNAs targeting exon 9 of hTNFRSF3. In some embodiments, the CRISPR gene-editing system for the treatment of psoriatic arthritis comprises one or more sgRNAs targeting exon 10 of hTNFRSF3. In some embodiments, the CRISPR gene-editing system for the treatment of psoriatic arthritis comprises one or more sgRNAs targeting exon 11 of hTNFRSF3. In some embodiments, the CRISPR gene-editing system for the treatment of psoriatic arthritis comprises one or more sgRNAs targeting exon 12 of hTNFRSF3. In some embodiments, the CRISPR gene-editing system for the treatment of PsA comprising one or more sgRNAs targeting an exon of hTNFRSF3 is delivered via one or more lipid nanoparticles (LNPs), the LNPs comprising an LNP system described herein, e.g., and without limitation, any one of LNP systems LNP001 to LNP240.

[0375] In some embodiments, the CRISPR gene-editing system for the treatment of psoriatic arthritis comprises one or more sgRNAs targeting exon 1 of cTNFRSF3. In some embodiments, the CRISPR gene-editing system for the treatment of psoriatic arthritis comprises one or more sgRNAs targeting exon 2 of cTNFRSF3. In some embodiments, the CRISPR gene-editing system for the treatment of psoriatic arthritis comprises one or more sgRNAs targeting exon 3 of cTNFRSF3. In some embodiments, the CRISPR gene-editing system for the treatment of psoriatic arthritis comprises one or more sgRNAs targeting exon 4 of cTNFRSF3. In some embodiments, the CRISPR gene-editing system for the treatment of psoriatic arthritis comprises one or more sgRNAs targeting exon 5 of cTNFRSF3. In some embodiments, the CRISPR gene-editing system for the treatment of psoriatic arthritis comprises one or more sgRNAs targeting exon 6 of cTNFRSF3. In some embodiments, the CRISPR gene-editing system for the treatment of psoriatic arthritis comprises one or more sgRNAs targeting exon 7 of cTNFRSF3. In some embodiments, the CRISPR gene-editing system for the treatment of psoriatic arthritis comprises one or more sgRNAs targeting exon 8 of cTNFRSF3. In some embodiments, the CRISPR gene-editing system for the treatment of psoriatic arthritis comprises one or more sgRNAs targeting exon 9 of cTNFRSF3. In some embodiments, the CRISPR gene-editing system for the treatment of psoriatic arthritis comprises one or more sgRNAs targeting exon 10 of cTNFRSF3. In some embodiments, the CRISPR gene-editing system for the treatment of PsA comprising one or more sgRNAs targeting an exon of cTNFRSF3 is delivered via one or more lipid nanoparticles (LNPs), the LNPs comprising an LNP system described herein, e.g., and without limitation, any one of LNP systems LNP001 to LNP240.

[0376] In some embodiments, the CRISPR gene-editing system for the treatment of psoriatic arthritis comprises one or more sgRNAs targeting exon 1 of eTNFRSF3. In some embodiments, the CRISPR gene-editing system for the treatment of psoriatic arthritis comprises one or more sgRNAs targeting exon 2 of eTNFRSF3. In some embodiments, the CRISPR gene-editing system for the treatment of psoriatic arthritis comprises one or more sgRNAs targeting exon 3 of eTNFRSF3. In some embodiments, the CRISPR gene-editing system for the treatment of psoriatic arthritis comprises one or more sgRNAs targeting exon 4 of eTNFRSF3. In some embodiments, the CRISPR gene-editing system for the treatment of psoriatic arthritis comprises one or more sgRNAs targeting exon 5 of eTNFRSF3. In some embodiments, the CRISPR gene-editing system for the treatment of psoriatic arthritis comprises one or more sgRNAs targeting exon 6 of eTNFRSF3. In some embodiments, the CRISPR gene-editing system for the treatment of psoriatic arthritis comprises one or more sgRNAs targeting exon 7 of eTNFRSF3. In some embodiments, the CRISPR gene-editing system for the treatment of psoriatic arthritis comprises one or more sgRNAs targeting exon 8 of eTNFRSF3. In some embodiments, the CRISPR gene-editing system for the treatment of psoriatic arthritis comprises one or more sgRNAs targeting exon 9 of eTNFRSF3. In some embodiments, the CRISPR gene-editing system for the treatment of psoriatic arthritis comprises one or more sgRNAs targeting exon 10 of eTNFRSF3. In some embodiments, the CRISPR gene-editing system for the treatment of PsA comprising one or more sgRNAs targeting an exon of eTNFRSF3 is delivered via one or more lipid nanoparticles (LNPs), the LNPs comprising an LNP system described herein, e.g., and without limitation, any one of LNP systems LNP001 to LNP240.

[0377] In some embodiments, the CRISPR gene-editing system for the treatment of psoriatic arthritis comprises one or more sgRNAs targeting exon 1 of fTNFRSF3. In some embodiments, the CRISPR gene-editing system for the treatment of psoriatic arthritis comprises one or more sgRNAs targeting exon 2 of fTNFRSF3. In some embodiments, the CRISPR gene-editing system for the treatment of psoriatic arthritis comprises one or more sgRNAs targeting exon 3 of fTNFRSF3. In some embodiments, the CRISPR gene-editing system for the treatment of psoriatic arthritis comprises one or more sgRNAs targeting exon 4 of fTNFRSF3. In some embodiments, the CRISPR gene-editing system for the treatment of psoriatic arthritis comprises one or more sgRNAs targeting exon 5 of fTNFRSF3. In some embodiments, the CRISPR gene-editing system for the treatment of psoriatic arthritis comprises one or more sgRNAs targeting exon 6 of fTNFRSF3. In some embodiments, the CRISPR gene-editing system for the treatment of psoriatic arthritis comprises one or more sgRNAs targeting exon 7 of fTNFRSF3. In some embodiments, the CRISPR gene-editing system for the treatment of psoriatic arthritis comprises one or more sgRNAs targeting exon 8 of fTNFRSF3. In some embodiments, the CRISPR gene-editing system for the treatment of psoriatic arthritis comprises one or more sgRNAs targeting exon 9 of fTNFRSF3. In some embodiments, the CRISPR gene-editing system for the treatment of psoriatic arthritis comprises one or more sgRNAs targeting exon 10 of fTNFRSF3. In some embodiments, the CRISPR gene-editing system for the treatment of PsA comprising one or more sgRNAs targeting an exon of fTNFRSF3 is delivered via one or more lipid nanoparticles (LNPs), the LNPs comprising an LNP system described herein, e.g., and without limitation, any one of LNP systems LNP001 to LNP240.

[0378] In some embodiments, the CRISPR gene-editing system for the treatment of psoriatic arthritis comprises one or more sgRNAs targeting TNFRSF4. In some embodiments, the CRISPR gene-editing system for the treatment of psoriatic arthritis comprises one or more sgRNAs targeting hTNFRSF4. In some embodiments, the CRISPR gene-editing system for the treatment of psoriatic arthritis comprises one or more sgRNAs targeting cTNFRSF4. In some embodiments, the CRISPR gene-editing system for the treatment of psoriatic arthritis comprises one or more sgRNAs targeting eTNFRSF4. In some embodiments, the CRISPR gene-editing system for the treatment of psoriatic arthritis comprises one or more sgRNAs targeting fTNFRSF4. In some embodiments, the CRISPR gene-editing system for the treatment of PsA comprising one or more sgRNAs targeting an exon of TNFRSF4 is delivered via one or more lipid nanoparticles (LNPs), the LNPs comprising an LNP system described herein, e.g., and without limitation, any one of LNP systems LNP001 to LNP240.

[0379] In some embodiments, the CRISPR gene-editing system for the treatment of psoriatic arthritis comprises one or more sgRNAs targeting exon 1 of hTNFRSF4. In some embodiments, the CRISPR gene-editing system for the treatment of psoriatic arthritis comprises one or more sgRNAs targeting exon 2 of hTNFRSF4. In some embodiments, the CRISPR gene-editing system for the treatment of psoriatic arthritis comprises one or more sgRNAs targeting exon 3 of hTNFRSF4. In some embodiments, the CRISPR gene-editing system for the treatment of psoriatic arthritis comprises one or more sgRNAs targeting exon 4 of hTNFRSF4. In some embodiments, the CRISPR gene-editing system for the treatment of psoriatic arthritis comprises one or more sgRNAs targeting exon 5 of hTNFRSF4. In some embodiments, the CRISPR gene-editing system for the treatment of psoriatic arthritis comprises one or more sgRNAs targeting exon 6 of hTNFRSF4. In some embodiments, the CRISPR gene-editing system for the treatment of PsA comprising one or more sgRNAs targeting an exon of hTNFRSF4 is delivered via one or more lipid nanoparticles (LNPs), the LNPs comprising an LNP system described herein, e.g., and without limitation, any one of LNP systems LNP001 to LNP240.

[0380] In some embodiments, the CRISPR gene-editing system for the treatment of psoriatic arthritis comprises one or more sgRNAs targeting exon 1 of cTNFRSF4. In some embodiments, the CRISPR gene-editing system for the treatment of psoriatic arthritis comprises one or more sgRNAs targeting exon 2 of cTNFRSF4. In some embodiments, the CRISPR gene-editing system for the treatment of psoriatic arthritis comprises one or more sgRNAs targeting exon 3 of cTNFRSF4. In some embodiments, the CRISPR gene-editing system for the treatment of psoriatic arthritis comprises one or more sgRNAs targeting exon 4 of cTNFRSF4. In some embodiments, the CRISPR gene-editing system for the treatment of psoriatic arthritis comprises one or more sgRNAs targeting exon 5 of cTNFRSF4. In some embodiments, the CRISPR gene-editing system for the treatment of psoriatic arthritis comprises one or more sgRNAs targeting exon 6 of cTNFRSF4. In some embodiments, the CRISPR gene-editing system for the treatment of psoriatic arthritis comprises one or more sgRNAs targeting exon 7 of cTNFRSF4. In some embodiments, the CRISPR gene-editing system for the treatment of PsA comprising one or more sgRNAs targeting an exon of cTNFRSF4 is delivered via one or more lipid nanoparticles (LNPs), the LNPs comprising an LNP system described herein, e.g., and without limitation, any one of LNP systems LNP001 to LNP240.

[0381] In some embodiments, the CRISPR gene-editing system for the treatment of psoriatic arthritis comprises one or more sgRNAs targeting exon 1 of eTNFRSF4. In some embodiments, the CRISPR gene-editing system for the treatment of psoriatic arthritis comprises one or more sgRNAs targeting exon 2 of eTNFRSF4. In some embodiments, the CRISPR gene-editing system for the treatment of psoriatic arthritis comprises one or more sgRNAs targeting exon 3 of eTNFRSF4. In some embodiments, the CRISPR gene-editing system for the treatment of psoriatic arthritis comprises one or more sgRNAs targeting exon 4 of eTNFRSF4. In some embodiments, the CRISPR gene-editing system for the treatment of psoriatic arthritis comprises one or more sgRNAs targeting exon 5 of eTNFRSF4. In some embodiments, the CRISPR gene-editing system for the treatment of psoriatic arthritis comprises one or more sgRNAs targeting exon 6 of eTNFRSF4. In some embodiments, the CRISPR gene-editing system for the treatment of psoriatic arthritis comprises one or more sgRNAs targeting exon 7 of eTNFRSF4. In some embodiments, the CRISPR gene-editing system for the treatment of PsA comprising one or more sgRNAs targeting an exon of eTNFRSF4 is delivered via one or more lipid nanoparticles (LNPs), the LNPs comprising an LNP system described herein, e.g., and without limitation, any one of LNP systems LNP001 to LNP240.

[0382] In some embodiments, the CRISPR gene-editing system for the treatment of psoriatic arthritis comprises one or more sgRNAs targeting exon 1 of fTNFRSF4. In some embodiments, the CRISPR gene-editing system for the treatment of psoriatic arthritis comprises one or more sgRNAs targeting exon 2 of fTNFRSF4. In some embodiments, the CRISPR gene-editing system for the treatment of psoriatic arthritis comprises one or more sgRNAs targeting exon 3 of fTNFRSF4. In some embodiments, the CRISPR gene-editing system for the treatment of psoriatic arthritis comprises one or more sgRNAs targeting exon 4 of fTNFRSF4. In some embodiments, the CRISPR gene-editing system for the treatment of psoriatic arthritis comprises one or more sgRNAs targeting exon 5 of fTNFRSF4. In some embodiments, the CRISPR gene-editing system for the treatment of psoriatic arthritis comprises one or more sgRNAs targeting exon 6 of fTNFRSF4. In some embodiments, the CRISPR gene-editing system for the treatment of psoriatic arthritis comprises one or more sgRNAs targeting exon 7 of fTNFRSF4. In some embodiments, the CRISPR gene-editing system for the treatment of PsA comprising one or more sgRNAs targeting an exon of fTNFRSF4 is delivered via one or more lipid nanoparticles (LNPs), the LNPs comprising an LNP system described herein, e.g., and without limitation, any one of LNP systems LNP001 to LNP240.

[0383] In some embodiments, the CRISPR gene-editing system for the treatment of psoriatic arthritis comprises one or more sgRNAs targeting TNFRSF11A. In some embodiments, the CRISPR gene-editing system for the treatment of psoriatic arthritis comprises one or more sgRNAs targeting hTNFRSF11A. In some embodiments, the CRISPR gene-editing system for the treatment of psoriatic arthritis comprises one or more sgRNAs targeting cTNFRSF11A. In some embodiments, the CRISPR gene-editing system for the treatment of psoriatic arthritis comprises one or more sgRNAs targeting eTNFRSF11A. In some embodiments, the CRISPR gene-editing system for the treatment of psoriatic arthritis comprises one or more sgRNAs targeting fTNFRSF11A. In some embodiments, the CRISPR gene-editing system for the treatment of PsA comprising one or more sgRNAs targeting an exon of TNFRSF11A is delivered via one or more lipid nanoparticles (LNPs), the LNPs comprising an LNP system described herein, e.g., and without limitation, any one of LNP systems LNP001 to LNP240.

[0384] In some embodiments, the CRISPR gene-editing system for the treatment of psoriatic arthritis comprises one or more sgRNAs targeting exon 1 of hTNFRSF11A. In some embodiments, the CRISPR gene-editing system for the treatment of psoriatic arthritis comprises one or more sgRNAs targeting exon 2 of hTNFRSF11A. In some embodiments, the CRISPR gene-editing system for the treatment of psoriatic arthritis comprises one or more sgRNAs targeting exon 3 of hTNFRSF11A. In some embodiments, the CRISPR gene-editing system for the treatment of psoriatic arthritis comprises one or more sgRNAs targeting exon 4 of hTNFRSF11A. In some embodiments, the CRISPR gene-editing system for the treatment of psoriatic arthritis comprises one or more sgRNAs targeting exon 5 of hTNFRSF11A. In some embodiments, the CRISPR gene-editing system for the treatment of psoriatic arthritis comprises one or more sgRNAs targeting exon 6 of hTNFRSF11A. In some embodiments, the CRISPR gene-editing system for the treatment of psoriatic arthritis comprises one or more sgRNAs targeting exon 7 of hTNFRSF11A. In some embodiments, the CRISPR gene-editing system for the treatment of psoriatic arthritis comprises one or more sgRNAs targeting exon 8 of hTNFRSF11A. In some embodiments, the CRISPR gene-editing system for the treatment of psoriatic arthritis comprises one or more sgRNAs targeting exon 9 of hTNFRSF11A. In some embodiments, the CRISPR gene-editing system for the treatment of psoriatic arthritis comprises one or more sgRNAs targeting exon 10 of hTNFRSF11A. In some embodiments, the CRISPR gene-editing system for the treatment of psoriatic arthritis comprises one or more sgRNAs targeting exon 11 of hTNFRSF11A. In some embodiments, the CRISPR gene-editing system for the treatment of psoriatic arthritis comprises one or more sgRNAs targeting exon 12 of hTNFRSF11A. In some embodiments, the CRISPR gene-editing system for the treatment of PsA comprising one or more sgRNAs targeting an exon of hTNFRSF11A is delivered via one or more lipid nanoparticles (LNPs), the LNPs comprising an LNP system described herein, e.g., and without limitation, any one of LNP systems LNP001 to LNP240.

[0385] In some embodiments, the CRISPR gene-editing system for the treatment of psoriatic arthritis comprises one or more sgRNAs targeting exon 1 of cTNFRSF11A. In some embodiments, the CRISPR gene-editing system for the treatment of psoriatic arthritis comprises one or more sgRNAs targeting exon 2 of cTNFRSF11A. In some embodiments, the CRISPR gene-editing system for the treatment of psoriatic arthritis comprises one or more sgRNAs targeting exon 3 of cTNFRSF11A. In some embodiments, the CRISPR gene-editing system for the treatment of psoriatic arthritis comprises one or more sgRNAs targeting exon 4 of cTNFRSF11A. In some embodiments, the CRISPR gene-editing system for the treatment of psoriatic arthritis comprises one or more sgRNAs targeting exon 5 of cTNFRSF11A. In some embodiments, the CRISPR gene-editing system for the treatment of psoriatic arthritis comprises one or more sgRNAs targeting exon 6 of cTNFRSF11A. In some embodiments, the CRISPR gene-editing system for the treatment of psoriatic arthritis comprises one or more sgRNAs targeting exon 7 of cTNFRSF11A. In some embodiments, the CRISPR gene-editing system for the treatment of psoriatic arthritis comprises one or more sgRNAs targeting exon 8 of cTNFRSF11A. In some embodiments, the CRISPR gene-editing system for the treatment of psoriatic arthritis comprises one or more sgRNAs targeting exon 9 of cTNFRSF11A. In some embodiments, the CRISPR gene-editing system for the treatment of psoriatic arthritis comprises one or more sgRNAs targeting exon 10 of cTNFRSF11A. In some embodiments, the CRISPR gene-editing system for the treatment of psoriatic arthritis comprises one or more sgRNAs targeting exon 11 of cTNFRSF11A. In some embodiments, the CRISPR gene-editing system for the treatment of PsA comprising one or more sgRNAs targeting an exon of cTNFRSF11A is delivered via one or more lipid nanoparticles (LNPs), the LNPs comprising an LNP system described herein, e.g., and without limitation, any one of LNP systems LNP001 to LNP240.

[0386] In some embodiments, the CRISPR gene-editing system for the treatment of psoriatic arthritis comprises one or more sgRNAs targeting exon 1 of eTNFRSF11A. In some embodiments, the CRISPR gene-editing system for the treatment of psoriatic arthritis comprises one or more sgRNAs targeting exon 2 of eTNFRSF11A. In some embodiments, the CRISPR gene-editing system for the treatment of psoriatic arthritis comprises one or more sgRNAs targeting exon 3 of eTNFRSF11A. In some embodiments, the CRISPR gene-editing system for the treatment of psoriatic arthritis comprises one or more sgRNAs targeting exon 4 of eTNFRSF11A. In some embodiments, the CRISPR gene-editing system for the treatment of psoriatic arthritis comprises one or more sgRNAs targeting exon 5 of eTNFRSF11A. In some embodiments, the CRISPR gene-editing system for the treatment of psoriatic arthritis comprises one or more sgRNAs targeting exon 6 of eTNFRSF11A. In some embodiments, the CRISPR gene-editing system for the treatment of psoriatic arthritis comprises one or more sgRNAs targeting exon 7 of eTNFRSF11A. In some embodiments, the CRISPR gene-editing system for the treatment of psoriatic arthritis comprises one or more sgRNAs targeting exon 8 of eTNFRSF11A. In some embodiments, the CRISPR gene-editing system for the treatment of psoriatic arthritis comprises one or more sgRNAs targeting exon 9 of eTNFRSF11A. In some embodiments, the CRISPR gene-editing system for the treatment of psoriatic arthritis comprises one or more sgRNAs targeting exon 10 of eTNFRSF11A. In some embodiments, the CRISPR gene-editing system for the treatment of PsA comprising one or more sgRNAs targeting an exon of eTNFRSF11A is delivered via one or more lipid nanoparticles (LNPs), the LNPs comprising an LNP system described herein, e.g., and without limitation, any one of LNP systems LNP001 to LNP240.

[0387] In some embodiments, the CRISPR gene-editing system for the treatment of psoriatic arthritis comprises one or more sgRNAs targeting exon 1 of fTNFRSF11A. In some embodiments, the CRISPR gene-editing system for the treatment of psoriatic arthritis comprises one or more sgRNAs targeting exon 2 of fTNFRSF11A. In some embodiments, the CRISPR gene-editing system for the treatment of psoriatic arthritis comprises one or more sgRNAs targeting exon 3 of fTNFRSF11A. In some embodiments, the CRISPR gene-editing system for the treatment of psoriatic arthritis comprises one or more sgRNAs targeting exon 4 of fTNFRSF11A. In some embodiments, the CRISPR gene-editing system for the treatment of psoriatic arthritis comprises one or more sgRNAs targeting exon 5 of fTNFRSF11A. In some embodiments, the CRISPR gene-editing system for the treatment of psoriatic arthritis comprises one or more sgRNAs targeting exon 6 of fTNFRSF11A. In some embodiments, the CRISPR gene-editing system for the treatment of psoriatic arthritis comprises one or more sgRNAs targeting exon 7 of fTNFRSF11A. In some embodiments, the CRISPR gene-editing system for the treatment of psoriatic arthritis comprises one or more sgRNAs targeting exon 8 of fTNFRSF11A. In some embodiments, the CRISPR gene-editing system for the treatment of psoriatic arthritis comprises one or more sgRNAs targeting exon 9 of fTNFRSF11A. In some embodiments, the CRISPR gene-editing system for the treatment of psoriatic arthritis comprises one or more sgRNAs targeting exon 10 of fTNFRSF11A. In some embodiments, the CRISPR gene-editing system for the treatment of psoriatic arthritis comprises one or more sgRNAs targeting exon 11 of fTNFRSF11A. In some embodiments, the CRISPR gene-editing system for the treatment of PsA comprising one or more sgRNAs targeting an exon of fTNFRSF11A is delivered via one or more lipid nanoparticles (LNPs), the LNPs comprising an LNP system described herein, e.g., and without limitation, any one of LNP systems LNP001 to LNP240.

### D. Gout

[0388] In one aspect, the present disclosure encompasses treatments for gout and other crystallopathies affecting the joint, e.g., octacalcium phosphate and calcium pyrophosphate dihydrate in horses. In some embodiments, the gout treatment comprises a therapeutically effective amount of a Clustered Regularly Interspaced Short Palindromic Repeats (CRISPR) gene-editing system, the system comprising: (i) a CRISPR Associated (Cas) protein; and (ii) at least one guide RNA targeting IL1R1. In some embodiments, the gout treatment comprises a CRISPR gene-editing system targeting hIL1R1. In some embodiments, the gout treatment comprises a CRISPR gene-editing system targeting cIL1R1. In some embodiments, the gout treatment comprises a CRISP gene-editing system R targeting eIL1R1. In some embodiments, the gout treatment comprises a CRISPR gene-editing system targeting fIL1R1. In some embodiments, the CRISPR gene-editing system for the treatment of gout comprising one or more sgRNAs targeting an exon of IL1R1 is delivered via one or more lipid nanoparticles (LNPs), the LNPs comprising an LNP system described herein, e.g., and without limitation, any one of LNP systems LNP001 to LNP240.

[0389] In some embodiments, the CRISPR gene-editing system for the treatment of gout comprises one or more sgRNAs targeting exon 1 of hIL1R1. In some embodiments, the CRISPR gene-editing system for the treatment of gout comprises one or more sgRNAs targeting exon 2 of hIL1R1. In some embodiments, the CRISPR gene-editing system for the treatment of gout comprises one or more sgRNAs targeting exon 3 of hIL1R1. In some embodiments, the CRISPR gene-editing system for the treatment of gout comprises one or more sgRNAs targeting exon 4 of hIL1R1. In some embodiments, the CRISPR gene-editing system for the treatment of gout comprises one or more sgRNAs targeting exon 5 of hIL1R1. In some embodiments, the CRISPR gene-editing system for the treatment of gout comprises one or more sgRNAs targeting exon 6 of hIL1R1. In some embodiments, the CRISPR gene-editing system for the treatment of gout comprises one or more sgRNAs targeting exon 7 of hIL1R1. In some embodiments, the CRISPR gene-editing system for the treatment of gout comprises one or more sgRNAs targeting exon 8 of hIL1R1. In some embodiments, the CRISPR gene-editing system for the treatment of gout comprises one or more sgRNAs targeting exon 9 of hIL1R1. In some embodiments, the CRISPR gene-editing system for the treatment of gout comprises one or more sgRNAs targeting exon 10 of hIL1R1. In some embodiments, the CRISPR gene-editing system for the treatment of gout comprises one or more sgRNAs targeting exon 11 of hIL1R1. In some embodiments, the CRISPR gene-editing system for the treatment of gout comprises one or more sgRNAs targeting exon 12 of hIL1R1. In some embodiments, the CRISPR gene-editing system for the treatment of gout comprises one or more sgRNAs targeting exon 13 of hIL1R1. In some embodiments, the CRISPR gene-editing system for the treatment of gout comprises one or more sgRNAs targeting exon 14 of hIL1R1. In some embodiments, the CRISPR gene-editing system for the treatment of gout comprises one or more sgRNAs targeting exon 15 of hIL1R1. In some embodiments, the CRISPR gene-editing system for the treatment of gout comprises one or more sgRNAs targeting exon 16 of hIL1R1. In some embodiments, the CRISPR gene-editing system for the treatment of gout comprises one or more sgRNAs targeting exon 17 of hIL1R1. In some embodiments, the CRISPR gene-editing system for the treatment of gout comprises one or more sgRNAs targeting exon 18 of hIL1R1. In some embodiments, the CRISPR gene-editing system for the treatment of gout comprises one or more sgRNAs targeting exon 19 of hIL1R1. In some embodiments, the CRISPR gene-editing system for the treatment of gout comprises one or more sgRNAs targeting exon 20 of hIL1R1. In some embodiments, the CRISPR gene-editing system for the treatment of gout comprises one or more sgRNAs targeting exon 21 of hIL1R1. In some embodiments, the CRISPR gene-editing system for the treatment of gout comprising one or more sgRNAs targeting an exon of hIL1R1 is delivered via one or more lipid nanoparticles (LNPs), the LNPs comprising an LNP system described herein, e.g., and without limitation, any one of LNP systems LNP001 to LNP240.

[0390] In some embodiments, the CRISPR gene-editing system for the treatment of gout comprises one or more sgRNAs targeting exon 1 of cIL1R1. In some embodiments, the CRISPR gene-editing system for the treatment of gout comprises one or more sgRNAs targeting exon 2 of cIL1R1. In some embodiments, the CRISPR gene-editing system for the treatment of gout comprises one or more sgRNAs targeting exon 3 of cIL1R1. In some embodiments, the CRISPR gene-editing system for the treatment of gout comprises one or more sgRNAs targeting exon 4 of cIL1R1. In some embodiments, the CRISPR gene-editing system for the treatment of gout comprises one or more sgRNAs targeting exon 5 of cIL1R1. In some embodiments, the CRISPR gene-editing system for the treatment of gout comprises one or more sgRNAs targeting exon 6 of cIL1R1. In some embodiments, the CRISPR gene-editing system for the treatment of gout comprises one or more sgRNAs targeting exon 7 of cIL1R1. In some embodiments, the CRISPR gene-editing system for the treatment of gout comprises one or more sgRNAs targeting exon 8 of cIL1R1. In some embodiments, the CRISPR gene-editing system for the treatment of gout comprises one or more sgRNAs targeting exon 9 of cIL1R1. In some embodiments, the CRISPR gene-editing system for the treatment of gout comprises one or more sgRNAs targeting exon 10 of cIL1R1. In some embodiments, the CRISPR gene-editing system for the treatment of gout comprises one or more sgRNAs targeting exon 11 of cIL1R1. In some embodiments, the CRISPR gene-editing system for the treatment of gout comprises one or more sgRNAs targeting exon 12 of cIL1R1. In some embodiments, the CRISPR gene-editing system for the treatment of gout comprises one or more sgRNAs targeting exon 13 of cIL1R1. In some embodiments, the CRISPR gene-editing system for the treatment of gout comprises one or more sgRNAs targeting exon 14 of cIL1R1. In some embodiments, the CRISPR gene-editing system for the treatment of gout comprises one or more sgRNAs targeting exon 15 of cIL1R1. In some embodiments, the CRISPR gene-editing system for the treatment of gout comprises one or more sgRNAs targeting exon 16 of cIL1R1. In some embodiments, the CRISPR gene-editing system for the treatment of gout comprising one or more sgRNAs targeting an exon of cIL1R1 is delivered via one or more lipid nanoparticles (LNPs), the LNPs comprising an LNP system described herein, e.g., and without limitation, any one of LNP systems LNP001 to LNP240.

[0391] In some embodiments, the CRISPR gene-editing system for the treatment of gout comprises one or more sgRNAs targeting exon 1 of eIL1R1. In some embodiments, the CRISPR gene-editing system for the treatment of gout comprises one or more sgRNAs targeting exon 2 of eIL1R1. In some embodiments, the CRISPR gene-editing system for the treatment of gout comprises one or more sgRNAs targeting exon 3 of eIL1R1. In some embodiments, the CRISPR gene-editing system for the treatment of gout comprises one or more sgRNAs targeting exon 4 of eIL1R1. In some embodiments, the CRISPR gene-editing system for the treatment of gout comprises one or more sgRNAs targeting exon 5 of eIL1R1. In some embodiments, the CRISPR gene-editing system for the treatment of gout comprises one or more sgRNAs targeting exon 6 of eIL1R1. In some embodiments, the CRISPR gene-editing system for the treatment of gout comprises one or more sgRNAs targeting exon 7 of eIL1R1. In some embodiments, the CRISPR gene-editing system for the treatment of gout comprises one or more sgRNAs targeting exon 8 of eIL1R1. In some embodiments, the CRISPR gene-editing system for the treatment of gout comprises one or more sgRNAs targeting exon 9 of eIL1R. In some embodiments, the CRISPR gene-editing system for the treatment of gout comprises one or more sgRNAs targeting exon 10 of eIL1R1. In some embodiments, the CRISPR gene-editing system for the treatment of gout comprises one or more sgRNAs targeting exon 11 of eIL1R1. In some embodiments, the CRISPR gene-editing system for the treatment of gout comprises one or more sgRNAs targeting exon 12 of eIL1R1. In some embodiments, the CRISPR gene-editing system for the treatment of gout comprises one or more sgRNAs targeting exon 13 of eIL1R1. In some embodiments, the CRISPR gene-editing system for the treatment of gout comprises one or more sgRNAs targeting exon 14 of eIL1R1. In some embodiments, the CRISPR gene-editing system for the treatment of gout comprises one or more sgRNAs targeting exon 15 of fIL1R1. In some embodiments, the CRISPR gene-editing system for the treatment of gout comprising one or more sgRNAs targeting an exon of eIL1R1 is delivered via one or more lipid nanoparticles (LNPs), the LNPs comprising an LNP system described herein, e.g., and without limitation, any one of LNP systems LNP001 to LNP240.

[0392] In some embodiments, the CRISPR gene-editing system for the treatment of gout comprises one or more sgRNAs targeting exon 1 of fIL1R1. In some embodiments, the CRISPR gene-editing system for the treatment of gout comprises one or more sgRNAs targeting exon 2 of fIL1R1. In some embodiments, the CRISPR gene-editing system for the treatment of gout comprises one or more sgRNAs targeting exon 3 of fIL1R1. In some embodiments, the CRISPR gene-editing system for the treatment of gout comprises one or more sgRNAs targeting exon 4 of fIL1R1. In some embodiments, the CRISPR gene-editing system for the treatment of gout comprises one or more sgRNAs targeting exon 5 of fIL1R1. In some embodiments, the CRISPR gene-editing system for the treatment of gout comprises one or more sgRNAs targeting exon 6 of fIL1R1. In some embodiments, the CRISPR gene-editing system for the treatment of gout comprises one or more sgRNAs targeting exon 7 of fIL1R1. In some embodiments, the CRISPR gene-editing system for the treatment of gout comprises one or more sgRNAs targeting exon 8 of fIL1R1. In some embodiments, the CRISPR gene-editing system for the treatment of gout comprises one or more sgRNAs targeting exon 9 of fIL1R1. In some embodiments, the CRISPR gene-editing system for the treatment of gout comprises one or more sgRNAs targeting exon 10 of fIL1R1. In some embodiments, the CRISPR gene-editing system for the treatment of gout comprises one or more sgRNAs targeting exon 11 of fIL1R. In some embodiments, the CRISPR gene-editing system for the treatment of gout comprises one or more sgRNAs targeting exon 12 of fIL1R1. In some embodiments, the CRISPR gene-editing system for the treatment of gout comprises one or more sgRNAs targeting exon 13 of fIL1R1. In some embodiments, the CRISPR gene-editing system for the treatment of gout comprises one or more sgRNAs targeting exon 14 of fIL1R1. In some embodiments, the CRISPR gene-editing system for the treatment of gout comprises one or more sgRNAs targeting exon 15 of fIL1R. In some embodiments, the CRISPR gene-editing system for the treatment of gout comprises one or more sgRNAs targeting exon 16 of fIL1R1. In some embodiments, the CRISPR gene-editing system for the treatment of gout comprises one or more sgRNAs targeting exon 17 of fIL1R1. In some embodiments, the CRISPR gene-editing system for the treatment of gout comprises one or more sgRNAs targeting exon 18 of fIL1R1. In some embodiments, the CRISPR gene-editing system for the treatment of gout comprising one or more sgRNAs targeting an exon of fIL1R1 is delivered via one or more lipid nanoparticles (LNPs), the LNPs comprising an LNP system described herein, e.g., and without limitation, any one of LNP systems LNP001 to LNP240.

[0393] In some embodiments, the CRISPR gene-editing system for the treatment of gout comprises one or more sgRNAs targeting IL1RAP. In some embodiments, the CRISPR gene-editing system for the treatment of gout comprises one or more sgRNAs targeting hIL1RAP. In some embodiments, the CRISPR gene-editing system for the treatment of gout comprises one or more sgRNAs targeting cIL1RAP. In some embodiments, the CRISPR gene-editing system for the treatment of gout comprises one or more sgRNAs targeting eIL1RAP. In some embodiments, the CRISPR gene-editing system for the treatment of gout comprises one or more sgRNAs targeting fIL1RAP. In some embodiments, the CRISPR gene-editing system for the treatment of gout comprising one or more sgRNAs targeting an exon of IL1RAP is delivered via one or more lipid nanoparticles (LNPs), the LNPs comprising an LNP system described herein, e.g., and without limitation, any one of LNP systems LNP001 to LNP240.

[0394] In some embodiments, the CRISPR gene-editing system for the treatment of gout comprises one or more sgRNAs targeting exon 1 of hIL1RAP. In some embodiments, the CRISPR gene-editing system for the treatment of gout comprises one or more sgRNAs targeting exon 2 of hIL1RAP. In some embodiments, the CRISPR gene-editing system for the treatment of gout comprises one or more sgRNAs targeting exon 3 of hIL1RAP. In some embodiments, the CRISPR gene-editing system for the treatment of gout comprises one or more sgRNAs targeting exon 4 of hIL1RAP. In some embodiments, the CRISPR gene-editing system for the treatment of gout comprises one or more sgRNAs targeting exon 5 of hIL1RAP. In some embodiments, the CRISPR gene-editing system for the treatment of gout comprises one or more sgRNAs targeting exon 6 of hIL1RAP. In some embodiments, the CRISPR gene-editing system for the treatment of gout comprises one or more sgRNAs targeting exon 7 of hIL1RAP. In some embodiments, the CRISPR gene-editing system for the treatment of gout comprises one or more sgRNAs targeting exon 8 of hIL1RAP. In some embodiments, the CRISPR gene-editing system for the treatment of gout comprises one or more sgRNAs targeting exon 9 of hIL1RAP. In some embodiments, the CRISPR gene-editing system for the treatment of gout comprises one or more sgRNAs targeting exon 10 of hIL1RAP. In some embodiments, the CRISPR gene-editing system for the treatment of gout comprises one or more sgRNAs targeting exon 11 of hIL1RAP. In some embodiments, the CRISPR gene-editing system for the treatment of gout comprises one or more sgRNAs targeting exon 12 of hIL1RAP. In some embodiments, the CRISPR gene-editing system for the treatment of gout comprises one or more sgRNAs targeting exon 13 of hIL1RAP. In some embodiments, the CRISPR gene-editing system for the treatment of gout comprises one or more sgRNAs targeting exon 14 of hIL1RAP. In some embodiments, the CRISPR gene-editing system for the treatment of gout comprises one or more sgRNAs targeting exon 15 of hIL1RAP. In some embodiments, the CRISPR gene-editing system for the treatment of gout comprises one or more sgRNAs targeting exon 16 of hIL1RAP. In some embodiments, the CRISPR gene-editing system for the treatment of gout comprises one or more sgRNAs targeting exon 17 of hIL1RAP. In some embodiments, the CRISPR gene-editing system for the treatment of gout comprising one or more sgRNAs targeting an exon of hIL1RAP is delivered via one or more lipid nanoparticles (LNPs), the LNPs comprising an LNP system described herein, e.g., and without limitation, any one of LNP systems LNP001 to LNP240.

[0395] In some embodiments, the CRISPR gene-editing system for the treatment of gout comprises one or more sgRNAs targeting exon 1 of cIL1RAP. In some embodiments, the CRISPR gene-editing system for the treatment of gout comprises one or more sgRNAs targeting exon 2 of cIL1RAP. In some embodiments, the CRISPR gene-editing system for the treatment of gout comprises one or more sgRNAs targeting exon 3 of cIL1RAP. In some embodiments, the CRISPR gene-editing system for the treatment of gout comprises one or more sgRNAs targeting exon 4 of cIL1RAP. In some embodiments, the CRISPR gene-editing system for the treatment of gout comprises one or more sgRNAs targeting exon 5 of cIL1RAP. In some embodiments, the CRISPR gene-editing system for the treatment of gout comprises one or more sgRNAs targeting exon 6 of cIL1RAP. In some embodiments, the CRISPR gene-editing system for the treatment of gout comprises one or more sgRNAs targeting exon 7 of cIL1RAP. In some embodiments, the CRISPR gene-editing system for the treatment of gout comprises one or more sgRNAs targeting exon 8 of cIL1RAP. In some embodiments, the CRISPR gene-editing system for the treatment of gout comprises one or more sgRNAs targeting exon 9 of cIL1RAP. In some embodiments, the CRISPR gene-editing system for the treatment of gout comprises one or more sgRNAs targeting exon 10 of cIL1RAP. In some embodiments, the CRISPR gene-editing system for the treatment of gout comprises one or more sgRNAs targeting exon 11 of cIL1RAP. In some embodiments, the CRISPR gene-editing system for the treatment of gout comprises one or more sgRNAs targeting exon 12 of cIL1RAP. In some embodiments, the CRISPR gene-editing system for the treatment of gout comprises one or more sgRNAs targeting exon 13 of cIL1RAP. In some embodiments, the CRISPR gene-editing system for the treatment of gout comprises one or more sgRNAs targeting exon 14 of cIL1RAP. In some embodiments, the CRISPR gene-editing system for the treatment of gout comprises one or more sgRNAs targeting exon 15 of cIL1RAP. In some embodiments, the CRISPR gene-editing system for the treatment of gout comprises one or more sgRNAs targeting exon 16 of cIL1RAP. In some embodiments, the CRISPR gene-editing system for the treatment of gout comprising one or more sgRNAs targeting an exon of cIL1RAP is delivered via one or more lipid nanoparticles (LNPs), the LNPs comprising an LNP system described herein, e.g., and without limitation, any one of LNP systems LNP001 to LNP240.

[0396] In some embodiments, the CRISPR gene-editing system for the treatment of gout comprises one or more sgRNAs targeting exon 1 of eIL1RAP. In some embodiments, the CRISPR gene-editing system for the treatment of gout comprises one or more sgRNAs targeting exon 2 of eIL1RAP. In some embodiments, the CRISPR gene-editing system for the treatment of gout comprises one or more sgRNAs targeting exon 3 of eIL1RAP. In some embodiments, the CRISPR gene-editing system for the treatment of gout comprises one or more sgRNAs targeting exon 4 of eIL1RAP. In some embodiments, the CRISPR gene-editing system for the treatment of gout comprises one or more sgRNAs targeting exon 5 of eIL1RAP. In some embodiments, the CRISPR gene-editing system for the treatment of gout comprises one or more sgRNAs targeting exon 6 of eIL1RAP. In some embodiments, the CRISPR gene-editing system for the treatment of gout comprises one or more sgRNAs targeting exon 7 of eIL1RAP. In some embodiments, the CRISPR gene-editing system for the treatment of gout comprises one or more sgRNAs targeting exon 8 of eIL1RAP. In some embodiments, the CRISPR gene-editing system for the treatment of gout comprises one or more sgRNAs targeting exon 9 of eIL1RAP. In some embodiments, the CRISPR gene-editing system for the treatment of gout comprises one or more sgRNAs targeting exon 10 of eIL1RAP. In some embodiments, the CRISPR gene-editing system for the treatment of gout comprises one or more sgRNAs targeting exon 11 of eIL1RAP. In some embodiments, the CRISPR gene-editing system for the treatment of gout comprises one or more sgRNAs targeting exon 12 of eIL1RAP. In some embodiments, the CRISPR gene-editing system for the treatment of gout comprises one or more sgRNAs targeting exon 13 of eIL1RAP. In some embodiments, the CRISPR gene-editing system for the treatment of gout comprising one or more sgRNAs targeting an exon of eIL1RAP is delivered via one or more lipid nanoparticles (LNPs), the LNPs comprising an LNP system described herein, e.g., and without limitation, any one of LNP systems LNP001 to LNP240.

[0397] In some embodiments, the CRISPR gene-editing system for the treatment of gout comprises one or more sgRNAs targeting exon 1 of fIL1RAP. In some embodiments, the CRISPR gene-editing system for the treatment of gout comprises one or more sgRNAs targeting exon 2 of fIL1RAP. In some embodiments, the CRISPR gene-editing system for the treatment of gout comprises one or more sgRNAs targeting exon 3 of fIL1RAP. In some embodiments, the CRISPR gene-editing system for the treatment of gout comprises one or more sgRNAs targeting exon 4 of fIL1RAP. In some embodiments, the CRISPR gene-editing system for the treatment of gout comprises one or more sgRNAs targeting exon 5 of fIL1RAP. In some embodiments, the CRISPR gene-editing system for the treatment of gout comprises one or more sgRNAs targeting exon 6 of fIL1RAP. In some embodiments, the CRISPR gene-editing system for the treatment of gout comprises one or more sgRNAs targeting exon 7 of fIL1RAP. In some embodiments, the CRISPR gene-editing system for the treatment of gout comprises one or more sgRNAs targeting exon 8 of fIL1RAP. In some embodiments, the CRISPR gene-editing system for the treatment of gout comprises one or more sgRNAs targeting exon 9 of fIL1RAP. In some embodiments, the CRISPR gene-editing system for the treatment of gout comprises one or more sgRNAs targeting exon 10 of fIL1RAP. In some embodiments, the CRISPR gene-editing system for the treatment of gout comprises one or more sgRNAs targeting exon 11 of fIL1RAP. In some embodiments, the CRISPR gene-editing system for the treatment of gout comprises one or more sgRNAs targeting exon 12 of fIL1RAP. In some embodiments, the CRISPR gene-editing system for the treatment of gout comprises one or more sgRNAs targeting exon 13 of fIL1RAP. In some embodiments, the CRISPR gene-editing system for the treatment of gout comprises one or more sgRNAs targeting exon 14 of fIL1RAP. In some embodiments, the CRISPR gene-editing system for the treatment of gout comprising one or more sgRNAs targeting an exon of fIL1RAP is delivered via one or more lipid nanoparticles (LNPs), the LNPs comprising an LNP system described herein, e.g., and without limitation, any one of LNP systems LNP001 to LNP240.

[0398] In some embodiments, the CRISPR gene-editing system for the treatment of gout comprises one or more sgRNAs targeting TGFBR1. In some embodiments, the CRISPR gene-editing system for the treatment of gout comprises one or more sgRNAs targeting hTGFBR1. In some embodiments, the CRISPR gene-editing system for the treatment of gout comprises one or more sgRNAs targeting cTGFBR1. In some embodiments, the CRISPR gene-editing system for the treatment of gout comprises one or more sgRNAs targeting e TGFBR1. In some embodiments, the CRISPR gene-editing system for the treatment of gout comprises one or more sgRNAs targeting fTGFBR1. In some embodiments, the CRISPR gene-editing system for the treatment of gout comprising one or more sgRNAs targeting an exon of TRGBR1 is delivered via one or more lipid nanoparticles (LNPs), the LNPs comprising an LNP system described herein, e.g., and without limitation, any one of LNP systems LNP001 to LNP240.

[0399] In some embodiments, the CRISPR gene-editing system for the treatment of gout comprises one or more sgRNAs targeting exon 1 of hTGFBR1. In some embodiments, the CRISPR gene-editing system for the treatment of gout comprises one or more sgRNAs targeting exon 2 of hTGFBR1. In some embodiments, the CRISPR gene-editing system for the treatment of gout comprises one or more sgRNAs targeting exon 3 of hTGFBR1. In some embodiments, the CRISPR gene-editing system for the treatment of gout comprises one or more sgRNAs targeting exon 4 of hTGFBR1. In some embodiments, the CRISPR gene-editing system for the treatment of gout comprises one or more sgRNAs targeting exon 5 of hTGFBR1. In some embodiments, the CRISPR gene-editing system for the treatment of gout comprises one or more sgRNAs targeting exon 6 of hTGFBR1. In some embodiments, the CRISPR gene-editing system for the treatment of gout comprises one or more sgRNAs targeting exon 7 of hTGFBR1. In some embodiments, the CRISPR gene-editing system for the treatment of gout comprises one or more sgRNAs targeting exon 8 of hTGFBR1. In some embodiments, the CRISPR gene-editing system for the treatment of gout comprises one or more sgRNAs targeting exon 9 of hTGFBR1. In some embodiments, the CRISPR gene-editing system for the treatment of gout comprises one or more sgRNAs targeting exon 10 of hTGFBR1. In some embodiments, the CRISPR gene-editing system for the treatment of gout comprises one or more sgRNAs targeting exon 11 of hTGFBR1. In some embodiments, the CRISPR gene-editing system for the treatment of gout comprising one or more sgRNAs targeting an exon of hTRGBR1 is delivered via one or more lipid nanoparticles (LNPs), the LNPs comprising an LNP system described herein, e.g., and without limitation, any one of LNP systems LNP001 to LNP240.

[0400] In some embodiments, the CRISPR gene-editing system for the treatment of gout comprises one or more sgRNAs targeting exon 1 of cTGFBR1. In some embodiments, the CRISPR gene-editing system for the treatment of gout comprises one or more sgRNAs targeting exon 2 of cTGFBR1. In some embodiments, the CRISPR gene-editing system for the treatment of gout comprises one or more sgRNAs targeting exon 3 of cTGFBR1. In some embodiments, the CRISPR gene-editing system for the treatment of gout comprises one or more sgRNAs targeting exon 4 of cTGFBR1. In some embodiments, the CRISPR gene-editing system for the treatment of gout comprises one or more sgRNAs targeting exon 5 of cTGFBR1. In some embodiments, the CRISPR gene-editing system for the treatment of gout comprises one or more sgRNAs targeting exon 6 of cTGFBR1. In some embodiments, the CRISPR gene-editing system for the treatment of gout comprises one or more sgRNAs targeting exon 7 of cTGFBR1. In some embodiments, the CRISPR gene-editing system for the treatment of gout comprises one or more sgRNAs targeting exon 8 of cTGFBR1. In some embodiments, the CRISPR gene-editing system for the treatment of gout comprises one or more sgRNAs targeting exon 9 of cTGFBR1. In some embodiments, the CRISPR gene-editing system for the treatment of gout comprising one or more sgRNAs targeting an exon of cTRGBR1 is delivered via one or more lipid nanoparticles (LNPs), the LNPs comprising an LNP system described herein, e.g., and without limitation, any one of LNP systems LNP001 to LNP240.

[0401] In some embodiments, the CRISPR gene-editing system for the treatment of gout comprises one or more sgRNAs targeting exon 1 of eTGFBR1. In some embodiments, the CRISPR gene-editing system for the treatment of gout comprises one or more sgRNAs targeting exon 2 of eTGFBR1. In some embodiments, the CRISPR gene-editing system for the treatment of gout comprises one or more sgRNAs targeting exon 3 of eTGFBR1. In some embodiments, the CRISPR gene-editing system for the treatment of gout comprises one or more sgRNAs targeting exon 4 of eTGFBR1. In some embodiments, the CRISPR gene-editing system for the treatment of gout comprises one or more sgRNAs targeting exon 5 of eTGFBR1. In some embodiments, the CRISPR gene-editing system for the treatment of gout comprises one or more sgRNAs targeting exon 6 of eTGFBR1. In some embodiments, the CRISPR gene-editing system for the treatment of gout comprises one or more sgRNAs targeting exon 7 of eTGFBR1. In some embodiments, the CRISPR gene-editing system for the treatment of gout comprises one or more sgRNAs targeting exon 8 of eTGFBR1. In some embodiments, the CRISPR gene-editing system for the treatment of gout comprises one or more sgRNAs targeting exon 9 of eTGFBR1. In some embodiments, the CRISPR gene-editing system for the treatment of gout comprises one or more sgRNAs targeting exon 10 of eTGFBR1. In some embodiments, the CRISPR gene-editing system for the treatment of gout comprises one or more sgRNAs targeting exon 11 of eTGFBR1. In some embodiments, the CRISPR gene-editing system for the treatment of gout comprises one or more sgRNAs targeting exon 12 of eTGFBR1. In some embodiments, the CRISPR gene-editing system for the treatment of gout comprising one or more sgRNAs targeting an exon of eTRGBR1 is delivered via one or more lipid nanoparticles (LNPs), the LNPs comprising an LNP system described herein, e.g., and without limitation, any one of LNP systems LNP001 to LNP240.

[0402] In some embodiments, the CRISPR gene-editing system for the treatment of gout comprises one or more sgRNAs targeting exon 1 of fTGFBR1. In some embodiments, the CRISPR gene-editing system for the treatment of gout comprises one or more sgRNAs targeting exon 2 of fTGFBR1. In some embodiments, the CRISPR gene-editing system for the treatment of gout comprises one or more sgRNAs targeting exon 3 of fTGFBR1. In some embodiments, the CRISPR gene-editing system for the treatment of gout comprises one or more sgRNAs targeting exon 4 of fTGFBR1. In some embodiments, the CRISPR gene-editing system for the treatment of gout comprises one or more sgRNAs targeting exon 5 of fTGFBR1. In some embodiments, the CRISPR gene-editing system for the treatment of gout comprises one or more sgRNAs targeting exon 6 of fTGFBR1. In some embodiments, the CRISPR gene-editing system for the treatment of gout comprises one or more sgRNAs targeting exon 7 of fTGFBR1. In some embodiments, the CRISPR gene-editing system for the treatment of gout comprises one or more sgRNAs targeting exon 8 of fTGFBR1. In some embodiments, the CRISPR gene-editing system for the treatment of gout comprises one or more sgRNAs targeting exon 9 of fTGFBR1. In some embodiments, the CRISPR gene-editing system for the treatment of gout comprises one or more sgRNAs targeting exon 10 of fTGFBR1. In some embodiments, the CRISPR gene-editing system for the treatment of gout comprises one or more sgRNAs targeting exon 11 of fTGFBR1. In some embodiments, the CRISPR gene-editing system for the treatment of gout comprising one or more sgRNAs targeting an exon of fTRGBR1 is delivered via one or more lipid nanoparticles (LNPs), the LNPs comprising an LNP system described herein, e.g., and without limitation, any one of LNP systems LNP001 to LNP240.

[0403] In some embodiments, the CRISPR gene-editing system for the treatment of gout comprises one or more sgRNAs targeting TGFBR2. In some embodiments, the CRISPR gene-editing system for the treatment of gout comprises one or more sgRNAs targeting hTGFBR2. In some embodiments, the CRISPR gene-editing system for the treatment of gout comprises one or more sgRNAs targeting cTGFBR2. In some embodiments, the CRISPR gene-editing system for the treatment of gout comprises one or more sgRNAs targeting eTGFBR2. In some embodiments, the CRISPR gene-editing system for the treatment of gout comprises one or more sgRNAs targeting fTGFBR2. In some embodiments, the CRISPR gene-editing system for the treatment of gout comprising one or more sgRNAs targeting an exon of TRGBR2 is delivered via one or more lipid nanoparticles (LNPs), the LNPs comprising an LNP system described herein, e.g., and without limitation, any one of LNP systems LNP001 to LNP240.

[0404] In some embodiments, the CRISPR gene-editing system for the treatment of gout comprises one or more sgRNAs targeting exon 1 of hTGFBR2. In some embodiments, the CRISPR gene-editing system for the treatment of gout comprises one or more sgRNAs targeting exon 2 of hTGFBR2. In some embodiments, the CRISPR gene-editing system for the treatment of gout comprises one or more sgRNAs targeting exon 3 of hTGFBR2. In some embodiments, the CRISPR gene-editing system for the treatment of gout comprises one or more sgRNAs targeting exon 4 of hTGFBR2. In some embodiments, the CRISPR gene-editing system for the treatment of gout comprises one or more sgRNAs targeting exon 5 of hTGFBR2. In some embodiments, the CRISPR gene-editing system for the treatment of gout comprises one or more sgRNAs targeting exon 6 of hTGFBR2. In some embodiments, the CRISPR gene-editing system for the treatment of gout comprises one or more sgRNAs targeting exon 7 of hTGFBR2. In some embodiments, the CRISPR gene-editing system for the treatment of gout comprises one or more sgRNAs targeting exon 8 of hTGFBR2. In some embodiments, the CRISPR gene-editing system for the treatment of gout comprises one or more sgRNAs targeting exon 9 of hTGFBR2. In some embodiments, the CRISPR gene-editing system for the treatment of gout comprising one or more sgRNAs targeting an exon of hTRGBR2 is delivered via one or more lipid nanoparticles (LNPs), the LNPs comprising an LNP system described herein, e.g., and without limitation, any one of LNP systems LNP001 to LNP240.

[0405] In some embodiments, the CRISPR gene-editing system for the treatment of gout comprises one or more sgRNAs targeting exon 1 of cTGFBR2. In some embodiments, the CRISPR gene-editing system for the treatment of gout comprises one or more sgRNAs targeting exon 2 of cTGFBR2. In some embodiments, the CRISPR gene-editing system for the treatment of gout comprises one or more sgRNAs targeting exon 3 of cTGFBR2. In some embodiments, the CRISPR gene-editing system for the treatment of gout comprises one or more sgRNAs targeting exon 4 of cTGFBR2. In some embodiments, the CRISPR gene-editing system for the treatment of gout comprises one or more sgRNAs targeting exon 5 of cTGFBR2. In some embodiments, the CRISPR gene-editing system for the treatment of gout comprises one or more sgRNAs targeting exon 6 of cTGFBR2. In some embodiments, the CRISPR gene-editing system for the treatment of gout comprises one or more sgRNAs targeting exon 7 of cTGFBR2. In some embodiments, the CRISPR gene-editing system for the treatment of gout comprises one or more sgRNAs targeting exon 8 of cTGFBR2. In some embodiments, the CRISPR gene-editing system for the treatment of gout comprising one or more sgRNAs targeting an exon of cTRGBR2 is delivered via one or more lipid nanoparticles (LNPs), the LNPs comprising an LNP system described herein, e.g., and without limitation, any one of LNP systems LNP001 to LNP240.

[0406] In some embodiments, the CRISPR gene-editing system for the treatment of gout comprises one or more sgRNAs targeting exon 1 of eTGFBR2. In some embodiments, the CRISPR gene-editing system for the treatment of gout comprises one or more sgRNAs targeting exon 2 of eTGFBR2. In some embodiments, the CRISPR gene-editing system for the treatment of gout comprises one or more sgRNAs targeting exon 3 of eTGFBR2. In some embodiments, the CRISPR gene-editing system for the treatment of gout comprises one or more sgRNAs targeting exon 4 of eTGFBR2. In some embodiments, the CRISPR gene-editing system for the treatment of gout comprises one or more sgRNAs targeting exon 5 of eTGFBR2. In some embodiments, the CRISPR gene-editing system for the treatment of gout comprises one or more sgRNAs targeting exon 6 of eTGFBR2. In some embodiments, the CRISPR gene-editing system for the treatment of gout comprises one or more sgRNAs targeting exon 7 of eTGFBR2. In some embodiments, the CRISPR gene-editing system for the treatment of gout comprises one or more sgRNAs targeting exon 8 of eTGFBR2. In some embodiments, the CRISPR gene-editing system for the treatment of gout comprises one or more sgRNAs targeting exon 9 of eTGFBR2. In some embodiments, the CRISPR gene-editing system for the treatment of gout comprises one or more sgRNAs targeting exon 10 of eTGFBR2. In some embodiments, the CRISPR gene-editing system for the treatment of gout comprising one or more sgRNAs targeting an exon of eTRGBR2 is delivered via one or more lipid nanoparticles (LNPs), the LNPs comprising an LNP system described herein, e.g., and without limitation, any one of LNP systems LNP001 to LNP240.

[0407] In some embodiments, the CRISPR gene-editing system for the treatment of gout comprises one or more sgRNAs targeting exon 1 of fTGFBR2. In some embodiments, the CRISPR gene-editing system for the treatment of gout comprises one or more sgRNAs targeting exon 2 of fTGFBR2. In some embodiments, the CRISPR gene-editing system for the treatment of gout comprises one or more sgRNAs targeting exon 3 of fTGFBR2. In some embodiments, the CRISPR gene-editing system for the treatment of gout comprises one or more sgRNAs targeting exon 4 of fTGFBR2. In some embodiments, the CRISPR gene-editing system for the treatment of gout comprises one or more sgRNAs targeting exon 5 of fTGFBR2. In some embodiments, the CRISPR gene-editing system for the treatment of gout comprises one or more sgRNAs targeting exon 6 of fTGFBR2. In some embodiments, the CRISPR gene-editing system for the treatment of gout comprises one or more sgRNAs targeting exon 7 of fTGFBR2. In some embodiments, the CRISPR gene-editing system for the treatment of gout comprises one or more sgRNAs targeting exon 8 of fTGFBR2. In some embodiments, the CRISPR gene-editing system for the treatment of gout comprising one or more sgRNAs targeting an exon of fTRGBR2 is delivered via one or more lipid nanoparticles (LNPs), the LNPs comprising an LNP system described herein, e.g., and without limitation, any one of LNP systems LNP001 to LNP240.

[0408] In some embodiments, the CRISPR gene-editing system for the treatment of gout comprises one or more sgRNAs targeting IL6R. In some embodiments, the CRISPR gene-editing system for the treatment of gout comprises one or more sgRNAs targeting hIL6R. In some embodiments, the CRISPR gene-editing system for the treatment of gout comprises one or more sgRNAs targeting cIL6R. In some embodiments, the CRISPR gene-editing system for the treatment of gout comprises one or more sgRNAs targeting eIL6R. In some embodiments, the CRISPR gene-editing system for the treatment of gout comprises one or more sgRNAs targeting fIL6R. In some embodiments, the CRISPR gene-editing system for the treatment of gout comprising one or more sgRNAs targeting an exon of IL6R is delivered via one or more lipid nanoparticles (LNPs), the LNPs comprising an LNP system described herein, e.g., and without limitation, any one of LNP systems LNP001 to LNP240.

[0409] In some embodiments, the CRISPR gene-editing system for the treatment of gout comprises one or more sgRNAs targeting exon 1 of hIL6R. In some embodiments, the CRISPR gene-editing system for the treatment of gout comprises one or more sgRNAs targeting exon 2 of hIL6R. In some embodiments, the CRISPR gene-editing system for the treatment of gout comprises one or more sgRNAs targeting exon 3 of hIL6R. In some embodiments, the CRISPR gene-editing system for the treatment of gout comprises one or more sgRNAs targeting exon 4 of hIL6R. In some embodiments, the CRISPR gene-editing system for the treatment of gout comprises one or more sgRNAs targeting exon 5 of hIL6R. In some embodiments, the CRISPR gene-editing system for the treatment of gout comprises one or more sgRNAs targeting exon 6 of hIL6R. In some embodiments, the CRISPR gene-editing system for the treatment of gout comprises one or more sgRNAs targeting exon 7 of hIL6R. In some embodiments, the CRISPR gene-editing system for the treatment of gout comprises one or more sgRNAs targeting exon 8 of hIL6R. In some embodiments, the CRISPR gene-editing system for the treatment of gout comprises one or more sgRNAs targeting exon 9 of hIL6R. In some embodiments, the CRISPR gene-editing system for the treatment of gout comprises one or more sgRNAs targeting exon 10 of hIL6R. In some embodiments, the CRISPR gene-editing system for the treatment of gout comprises one or more sgRNAs targeting exon 11 of hIL6R In some embodiments, the CRISPR gene-editing system for the treatment of gout comprises one or more sgRNAs targeting exon 12 of hIL6R. In some embodiments, the CRISPR gene-editing system for the treatment of gout comprises one or more sgRNAs targeting exon 13 of hIL6R. In some embodiments, the CRISPR gene-editing system for the treatment of gout comprises one or more sgRNAs targeting exon 14 of hIL6R. In some embodiments, the CRISPR gene-editing system for the treatment of gout comprises one or more sgRNAs targeting exon 15 of hIL6R. In some embodiments, the CRISPR gene-editing system for the treatment of gout comprising one or more sgRNAs targeting an exon of hIL6R is delivered via one or more lipid nanoparticles (LNPs), the LNPs comprising an LNP system described herein, e.g., and without limitation, any one of LNP systems LNP001 to LNP240.

[0410] In some embodiments, the CRISPR gene-editing system for the treatment of gout comprises one or more sgRNAs targeting exon 1 of cIL6R. In some embodiments, the CRISPR gene-editing system for the treatment of gout comprises one or more sgRNAs targeting exon 2 of cIL6R. In some embodiments, the CRISPR gene-editing system for the treatment of gout comprises one or more sgRNAs targeting exon 3 of cIL6R. In some embodiments, the CRISPR gene-editing system for the treatment of gout comprises one or more sgRNAs targeting exon 4 of cIL6R. In some embodiments, the CRISPR gene-editing system for the treatment of gout comprises one or more sgRNAs targeting exon 5 of cIL6R. In some embodiments, the CRISPR gene-editing system for the treatment of gout comprises one or more sgRNAs targeting exon 6 of cIL6R. In some embodiments, the CRISPR gene-editing system for the treatment of gout comprises one or more sgRNAs targeting exon 7 of cIL6R. In some embodiments, the CRISPR gene-editing system for the treatment of gout comprises one or more sgRNAs targeting exon 8 of cIL6R. In some embodiments, the CRISPR gene-editing system for the treatment of gout comprises one or more sgRNAs targeting exon 9 of cIL6R. In some embodiments, the CRISPR gene-editing system for the treatment of gout comprises one or more sgRNAs targeting exon 10 of cIL6R. In some embodiments, the CRISPR gene-editing system for the treatment of gout comprises one or more sgRNAs targeting exon 11 of cIL6R. In some embodiments, the CRISPR gene-editing system for the treatment of gout comprises one or more sgRNAs targeting exon 12 of cIL6R. In some embodiments, the CRISPR gene-editing system for the treatment of gout comprises one or more sgRNAs targeting exon 13 of cIL6R. In some embodiments, the CRISPR gene-editing system for the treatment of gout comprising one or more sgRNAs targeting an exon of cIL6R is delivered via one or more lipid nanoparticles (LNPs), the LNPs comprising an LNP system described herein, e.g., and without limitation, any one of LNP systems LNP001 to LNP240.

[0411] In some embodiments, the CRISPR gene-editing system for the treatment of gout comprises one or more sgRNAs targeting exon 1 of eIL6R. In some embodiments, the CRISPR gene-editing system for the treatment of gout comprises one or more sgRNAs targeting exon 2 of eIL6R. In some embodiments, the CRISPR gene-editing system for the treatment of gout comprises one or more sgRNAs targeting exon 3 of eIL6R. In some embodiments, the CRISPR gene-editing system for the treatment of gout comprises one or more sgRNAs targeting exon 4 of eIL6R. In some embodiments, the CRISPR gene-editing system for the treatment of gout comprises one or more sgRNAs targeting exon 5 of eIL6R. In some embodiments, the CRISPR gene-editing system for the treatment of gout comprises one or more sgRNAs targeting exon 6 of eIL6R. In some embodiments, the CRISPR gene-editing system for the treatment of gout comprises one or more sgRNAs targeting exon 7 of eIL6R. In some embodiments, the CRISPR gene-editing system for the treatment of gout comprises one or more sgRNAs targeting exon 8 of eIL6R. In some embodiments, the CRISPR gene-editing system for the treatment of gout comprises one or more sgRNAs targeting exon 9 of eIL6R. In some embodiments, the CRISPR gene-editing system for the treatment of gout comprises one or more sgRNAs targeting exon 10 of eIL6R. In some embodiments, the CRISPR gene-editing system for the treatment of gout comprises one or more sgRNAs targeting exon 11 of eIL6R. In some embodiments, the CRISPR gene-editing system for the treatment of gout comprising one or more sgRNAs targeting an exon of eIL6R is delivered via one or more lipid nanoparticles (LNPs), the LNPs comprising an LNP system described herein, e.g., and without limitation, any one of LNP systems LNP001 to LNP240.

[0412] In some embodiments, the CRISPR gene-editing system for the treatment of gout comprises one or more sgRNAs targeting exon 1 of fIL6R. In some embodiments, the CRISPR gene-editing system for the treatment of gout comprises one or more sgRNAs targeting exon 2 of fIL6R. In some embodiments, the CRISPR gene-editing system for the treatment of gout comprises one or more sgRNAs targeting exon 3 of fIL6R. In some embodiments, the CRISPR gene-editing system for the treatment of gout comprises one or more sgRNAs targeting exon 4 of fIL6R. In some embodiments, the CRISPR gene-editing system for the treatment of gout comprises one or more sgRNAs targeting exon 5 of fIL6R. In some embodiments, the CRISPR gene-editing system for the treatment of gout comprises one or more sgRNAs targeting exon 6 of fIL6R. In some embodiments, the CRISPR gene-editing system for the treatment of gout comprises one or more sgRNAs targeting exon 7 of fIL6R. In some embodiments, the CRISPR gene-editing system for the treatment of gout comprises one or more sgRNAs targeting exon 8 of fIL6R. In some embodiments, the CRISPR gene-editing system for the treatment of gout comprises one or more sgRNAs targeting exon 9 of fIL6R. In some embodiments, the CRISPR gene-editing system for the treatment of gout comprises one or more sgRNAs targeting exon 10 of fIL6R. In some embodiments, the CRISPR gene-editing system for the treatment of gout comprising one or more sgRNAs targeting an exon of fIL6R is delivered via one or more lipid nanoparticles (LNPs), the LNPs comprising an LNP system described herein, e.g., and without limitation, any one of LNP systems LNP001 to LNP240.

[0413] In some embodiments, the CRISPR gene-editing system for the treatment of gout comprises one or more sgRNAs targeting IL6ST. In some embodiments, the CRISPR gene-editing system for the treatment of gout comprises one or more sgRNAs targeting hIL6ST. In some embodiments, the CRISPR gene-editing system for the treatment of gout comprises one or more sgRNAs targeting cIL6ST. In some embodiments, the CRISPR gene-editing system for the treatment of gout comprises one or more sgRNAs targeting eIL6ST. In some embodiments, the CRISPR gene-editing system for the treatment of gout comprises one or more sgRNAs targeting fIL6ST. In some embodiments, the CRISPR gene-editing system for the treatment of gout comprising one or more sgRNAs targeting an exon of IL6ST is delivered via one or more lipid nanoparticles (LNPs), the LNPs comprising an LNP system described herein, e.g., and without limitation, any one of LNP systems LNP001 to LNP240.

[0414] In some embodiments, the CRISPR gene-editing system for the treatment of gout comprises one or more sgRNAs targeting exon 1 of hIL6ST. In some embodiments, the CRISPR gene-editing system for the treatment of gout comprises one or more sgRNAs targeting exon 2 of hIL6ST. In some embodiments, the CRISPR gene-editing system for the treatment of gout comprises one or more sgRNAs targeting exon 3 of hIL6ST. In some embodiments, the CRISPR gene-editing system for the treatment of gout comprises one or more sgRNAs targeting exon 4 of hIL6ST. In some embodiments, the CRISPR gene-editing system for the treatment of gout comprises one or more sgRNAs targeting exon 5 of hIL6ST. In some embodiments, the CRISPR gene-editing system for the treatment of gout comprises one or more sgRNAs targeting exon 6 of hIL6ST. In some embodiments, the CRISPR gene-editing system for the treatment of gout comprises one or more sgRNAs targeting exon 7 of hIL6ST. In some embodiments, the CRISPR gene-editing system for the treatment of gout comprises one or more sgRNAs targeting exon 8 of hIL6ST. In some embodiments, the CRISPR gene-editing system for the treatment of gout comprises one or more sgRNAs targeting exon 9 of hIL6ST. In some embodiments, the CRISPR gene-editing system for the treatment of gout comprises one or more sgRNAs targeting exon 10 of hIL6ST. In some embodiments, the CRISPR gene-editing system for the treatment of gout comprises one or more sgRNAs targeting exon 11 of hIL6ST. In some embodiments, the CRISPR gene-editing system for the treatment of gout comprises one or more sgRNAs targeting exon 12 of hIL6ST. In some embodiments, the CRISPR gene-editing system for the treatment of gout comprises one or more sgRNAs targeting exon 13 of hIL6ST. In some embodiments, the CRISPR gene-editing system for the treatment of gout comprises one or more sgRNAs targeting exon 14 of hIL6ST. In some embodiments, the CRISPR gene-editing system for the treatment of gout comprises one or more sgRNAs targeting exon 15 of hIL6ST. In some embodiments, the CRISPR gene-editing system for the treatment of gout comprises one or more sgRNAs targeting exon 16 of hIL6ST. In some embodiments, the CRISPR gene-editing system for the treatment of gout comprises one or more sgRNAs targeting exon 17 of hIL6ST. In some embodiments, the CRISPR gene-editing system for the treatment of gout comprises one or more sgRNAs targeting exon 18 of hIL6ST. In some embodiments, the CRISPR gene-editing system for the treatment of gout comprises one or more sgRNAs targeting exon 19 of hIL6ST. In some embodiments, the CRISPR gene-editing system for the treatment of gout comprising one or more sgRNAs targeting an exon of hIL6ST is delivered via one or more lipid nanoparticles (LNPs), the LNPs comprising an LNP system described herein, e.g., and without limitation, any one of LNP systems LNP001 to LNP240.

[0415] In some embodiments, the CRISPR gene-editing system for the treatment of gout comprises one or more sgRNAs targeting exon 1 of cIL6ST. In some embodiments, the CRISPR gene-editing system for the treatment of gout comprises one or more sgRNAs targeting exon 2 of cIL6ST. In some embodiments, the CRISPR gene-editing system for the treatment of gout comprises one or more sgRNAs targeting exon 3 of cIL6ST. In some embodiments, the CRISPR gene-editing system for the treatment of gout comprises one or more sgRNAs targeting exon 4 of cIL6ST. In some embodiments, the CRISPR gene-editing system for the treatment of gout comprises one or more sgRNAs targeting exon 5 of cIL6ST. In some embodiments, the CRISPR gene-editing system for the treatment of gout comprises one or more sgRNAs targeting exon 6 of cIL6ST. In some embodiments, the CRISPR gene-editing system for the treatment of gout comprises one or more sgRNAs targeting exon 7 of cIL6ST. In some embodiments, the CRISPR gene-editing system for the treatment of gout comprises one or more sgRNAs targeting exon 8 of cIL6ST. In some embodiments, the CRISPR gene-editing system for the treatment of gout comprises one or more sgRNAs targeting exon 9 of cIL6ST. In some embodiments, the CRISPR gene-editing system for the treatment of gout comprises one or more sgRNAs targeting exon 10 of cIL6ST. In some embodiments, the CRISPR gene-editing system for the treatment of gout comprises one or more sgRNAs targeting exon 11 of cIL6ST In some embodiments, the CRISPR gene-editing system for the treatment of gout comprises one or more sgRNAs targeting exon 12 of cIL6ST. In some embodiments, the CRISPR gene-editing system for the treatment of gout comprises one or more sgRNAs targeting exon 13 of cIL6ST. In some embodiments, the CRISPR gene-editing system for the treatment of gout comprises one or more sgRNAs targeting exon 14 of cIL6ST. In some embodiments, the CRISPR gene-editing system for the treatment of gout comprises one or more sgRNAs targeting exon 15 of cIL6ST. In some embodiments, the CRISPR gene-editing system for the treatment of gout comprises one or more sgRNAs targeting exon 16 of cIL6ST. In some embodiments, the CRISPR gene-editing system for the treatment of gout comprises one or more sgRNAs targeting exon 17 of cIL6ST. In some embodiments, the CRISPR gene-editing system for the treatment of gout comprises one or more sgRNAs targeting exon 18 of cIL6ST. In some embodiments, the CRISPR gene-editing system for the treatment of gout comprising one or more sgRNAs targeting an exon of cIL6ST is delivered via one or more lipid nanoparticles (LNPs), the LNPs comprising an LNP system described herein, e.g., and without limitation, any one of LNP systems LNP001 to LNP240.

[0416] In some embodiments, the CRISPR gene-editing system for the treatment of gout comprises one or more sgRNAs targeting exon 1 of eIL6ST. In some embodiments, the CRISPR gene-editing system for the treatment of gout comprises one or more sgRNAs targeting exon 2 of eIL6ST. In some embodiments, the CRISPR gene-editing system for the treatment of gout comprises one or more sgRNAs targeting exon 3 of eIL6ST. In some embodiments, the CRISPR gene-editing system for the treatment of gout comprises one or more sgRNAs targeting exon 4 of eIL6ST. In some embodiments, the CRISPR gene-editing system for the treatment of gout comprises one or more sgRNAs targeting exon 5 of eIL6ST. In some embodiments, the CRISPR gene-editing system for the treatment of gout comprises one or more sgRNAs targeting exon 6 of eIL6ST. In some embodiments, the CRISPR gene-editing system for the treatment of gout comprises one or more sgRNAs targeting exon 7 of eIL6ST. In some embodiments, the CRISPR gene-editing system for the treatment of gout comprises one or more sgRNAs targeting exon 8 of eIL6ST. In some embodiments, the CRISPR gene-editing system for the treatment of gout comprises one or more sgRNAs targeting exon 9 of eIL6ST. In some embodiments, the CRISPR gene-editing system for the treatment of gout comprises one or more sgRNAs targeting exon 10 of eIL6ST. In some embodiments, the CRISPR gene-editing system for the treatment of gout comprises one or more sgRNAs targeting exon 11 of eIL6ST In some embodiments, the CRISPR gene-editing system for the treatment of gout comprises one or more sgRNAs targeting exon 12 of eIL6ST. In some embodiments, the CRISPR gene-editing system for the treatment of gout comprises one or more sgRNAs targeting exon 13 of eIL6ST. In some embodiments, the CRISPR gene-editing system for the treatment of gout comprises one or more sgRNAs targeting exon 14 of eIL6ST. In some embodiments, the CRISPR gene-editing system for the treatment of gout comprises one or more sgRNAs targeting exon 15 of eIL6ST. In some embodiments, the CRISPR gene-editing system for the treatment of gout comprises one or more sgRNAs targeting exon 16 of eIL6ST. In some embodiments, the CRISPR gene-editing system for the treatment of gout comprises one or more sgRNAs targeting exon 17 of eIL6ST. In some embodiments, the CRISPR gene-editing system for the treatment of gout comprises one or more sgRNAs targeting exon 18 of eIL6ST. In some embodiments, the CRISPR gene-editing system for the treatment of gout comprising one or more sgRNAs targeting an exon of eIL6ST is delivered via one or more lipid nanoparticles (LNPs), the LNPs comprising an LNP system described herein, e.g., and without limitation, any one of LNP systems LNP001 to LNP240.

[0417] In some embodiments, the CRISPR gene-editing system for the treatment of gout comprises one or more sgRNAs targeting exon 1 of fIL6ST. In some embodiments, the CRISPR gene-editing system for the treatment of gout comprises one or more sgRNAs targeting exon 2 of fIL6ST. In some embodiments, the CRISPR gene-editing system for the treatment of gout comprises one or more sgRNAs targeting exon 3 of fIL6ST. In some embodiments, the CRISPR gene-editing system for the treatment of gout comprises one or more sgRNAs targeting exon 4 of fIL6ST. In some embodiments, the CRISPR gene-editing system for the treatment of gout comprises one or more sgRNAs targeting exon 5 of fIL6ST. In some embodiments, the CRISPR gene-editing system for the treatment of gout comprises one or more sgRNAs targeting exon 6 of fIL6ST. In some embodiments, the CRISPR gene-editing system for the treatment of gout comprises one or more sgRNAs targeting exon 7 of fIL6ST. In some embodiments, the CRISPR gene-editing system for the treatment of gout comprises one or more sgRNAs targeting exon 8 of fIL6ST. In some embodiments, the CRISPR gene-editing system for the treatment of gout comprises one or more sgRNAs targeting exon 9 of fIL6ST. In some embodiments, the CRISPR gene-editing system for the treatment of gout comprises one or more sgRNAs targeting exon 10 of fIL6ST. In some embodiments, the CRISPR gene-editing system for the treatment of gout comprises one or more sgRNAs targeting exon 11 of fIL6ST In some embodiments, the CRISPR gene-editing system for the treatment of gout comprises one or more sgRNAs targeting exon 12 of fIL6ST. In some embodiments, the CRISPR gene-editing system for the treatment of gout comprises one or more sgRNAs targeting exon 13 of fIL6ST. In some embodiments, the CRISPR gene-editing system for the treatment of gout comprises one or more sgRNAs targeting exon 14 of fIL6ST. In some embodiments, the CRISPR gene-editing system for the treatment of gout comprises one or more sgRNAs targeting exon 15 of fIL6ST. In some embodiments, the CRISPR gene-editing system for the treatment of gout comprises one or more sgRNAs targeting exon 16 of fIL6ST. In some embodiments, the CRISPR gene-editing system for the treatment of gout comprises one or more sgRNAs targeting exon 17 of fIL6ST. In some embodiments, the CRISPR gene-editing system for the treatment of gout comprises one or more sgRNAs targeting exon 18 of fIL6ST. In some embodiments, the CRISPR gene-editing system for the treatment of gout comprises one or more sgRNAs targeting exon 19 of fIL6ST. In some embodiments, the CRISPR gene-editing system for the treatment of gout comprises one or more sgRNAs targeting exon 20 of fIL6ST. In some embodiments, the CRISPR gene-editing system for the treatment of gout comprising one or more sgRNAs targeting an exon of fIL6ST is delivered via one or more lipid nanoparticles (LNPs), the LNPs comprising an LNP system described herein, e.g., and without limitation, any one of LNP systems LNP001 to LNP240.

[0418] In some embodiments, the CRISPR gene-editing system for the treatment of gout comprises one or more sgRNAs targeting TNFRSF1A. In some embodiments, the CRISPR gene-editing system for the treatment of gout comprises one or more sgRNAs targeting hTNFRSF1A. In some embodiments, the CRISPR gene-editing system for the treatment of gout comprises one or more sgRNAs targeting cTNFRSF1A. In some embodiments, the CRISPR gene-editing system for the treatment of gout comprises one or more sgRNAs targeting eTNFRSF1A. In some embodiments, the CRISPR gene-editing system for the treatment of gout comprises one or more sgRNAs targeting fTNFRSF1A. In some embodiments, the CRISPR gene-editing system for the treatment of gout comprising one or more sgRNAs targeting an exon of TNFRSF1A is delivered via one or more lipid nanoparticles (LNPs), the LNPs comprising an LNP system described herein, e.g., and without limitation, any one of LNP systems LNP001 to LNP240.

[0419] In some embodiments, the CRISPR gene-editing system for the treatment of gout comprises one or more sgRNAs targeting exon 1 of hTNFRSF1A. In some embodiments, the CRISPR gene-editing system for the treatment of gout comprises one or more sgRNAs targeting exon 2 of hTNFRSF1A. In some embodiments, the CRISPR gene-editing system for the treatment of gout comprises one or more sgRNAs targeting exon 3 of hTNFRSF1A. In some embodiments, the CRISPR gene-editing system for the treatment of gout comprises one or more sgRNAs targeting exon 4 of hTNFRSF1A. In some embodiments, the CRISPR gene-editing system for the treatment of gout comprises one or more sgRNAs targeting exon 5 of hTNFRSF1A. In some embodiments, the CRISPR gene-editing system for the treatment of gout comprises one or more sgRNAs targeting exon 6 of hTNFRSF1A. In some embodiments, the CRISPR gene-editing system for the treatment of gout comprises one or more sgRNAs targeting exon 7 of hTNFRSF1A. In some embodiments, the CRISPR gene-editing system for the treatment of gout comprises one or more sgRNAs targeting exon 8 of hTNFRSF1A. In some embodiments, the CRISPR gene-editing system for the treatment of gout comprises one or more sgRNAs targeting exon 9 of hTNFRSF1A. In some embodiments, the CRISPR gene-editing system for the treatment of gout comprises one or more sgRNAs targeting exon 10 of hTNFRSF1A. In some embodiments, the CRISPR gene-editing system for the treatment of gout comprises one or more sgRNAs targeting exon 11 of hTNFRSF1A. In some embodiments, the CRISPR gene-editing system for the treatment of gout comprising one or more sgRNAs targeting an exon of hTNFRSF1A is delivered via one or more lipid nanoparticles (LNPs), the LNPs comprising an LNP system described herein, e.g., and without limitation, any one of LNP systems LNP001 to LNP240.

[0420] In some embodiments, the CRISPR gene-editing system for the treatment of gout comprises one or more sgRNAs targeting exon 1 of cTNFRSF1A. In some embodiments, the CRISPR gene-editing system for the treatment of gout comprises one or more sgRNAs targeting exon 2 of cTNFRSF1A. In some embodiments, the CRISPR gene-editing system for the treatment of gout comprises one or more sgRNAs targeting exon 3 of cTNFRSF1A. In some embodiments, the CRISPR gene-editing system for the treatment of gout comprises one or more sgRNAs targeting exon 4 of cTNFRSF1A. In some embodiments, the CRISPR gene-editing system for the treatment of gout comprises one or more sgRNAs targeting exon 5 of cTNFRSF1A. In some embodiments, the CRISPR gene-editing system for the treatment of gout comprises one or more sgRNAs targeting exon 6 of cTNFRSF1A. In some embodiments, the CRISPR gene-editing system for the treatment of gout comprises one or more sgRNAs targeting exon 7 of cTNFRSF1A. In some embodiments, the CRISPR gene-editing system for the treatment of gout comprises one or more sgRNAs targeting exon 8 of cTNFRSF1A. In some embodiments, the CRISPR gene-editing system for the treatment of gout comprises one or more sgRNAs targeting exon 9 of cTNFRSF1A. In some embodiments, the CRISPR gene-editing system for the treatment of gout comprises one or more sgRNAs targeting exon 10 of cTNFRSF1A. In some embodiments, the CRISPR gene-editing system for the treatment of gout comprises one or more sgRNAs targeting exon 11 of cTNFRSF1A. In some embodiments, the CRISPR gene-editing system for the treatment of gout comprising one or more sgRNAs targeting an exon of cTNFRSF1A is delivered via one or more lipid nanoparticles (LNPs), the LNPs comprising an LNP system described herein, e.g., and without limitation, any one of LNP systems LNP001 to LNP240.

[0421] In some embodiments, the CRISPR gene-editing system for the treatment of gout comprises one or more sgRNAs targeting exon 1 of eTNFRSF1A. In some embodiments, the CRISPR gene-editing system for the treatment of gout comprises one or more sgRNAs targeting exon 2 of eTNFRSF1A. In some embodiments, the CRISPR gene-editing system for the treatment of gout comprises one or more sgRNAs targeting exon 3 of eTNFRSF1A. In some embodiments, the CRISPR gene-editing system for the treatment of gout comprises one or more sgRNAs targeting exon 4 of eTNFRSF1A. In some embodiments, the CRISPR gene-editing system for the treatment of gout comprises one or more sgRNAs targeting exon 5 of eTNFRSF1A. In some embodiments, the CRISPR gene-editing system for the treatment of gout comprises one or more sgRNAs targeting exon 6 of eTNFRSF1A. In some embodiments, the CRISPR gene-editing system for the treatment of gout comprises one or more sgRNAs targeting exon 7 of eTNFRSF1A. In some embodiments, the CRISPR gene-editing system for the treatment of gout comprises one or more sgRNAs targeting exon 8 of eTNFRSF1A. In some embodiments, the CRISPR gene-editing system for the treatment of gout comprises one or more sgRNAs targeting exon 9 of eTNFRSF1A. In some embodiments, the CRISPR gene-editing system for the treatment of gout comprises one or more sgRNAs targeting exon 10 of eTNFRSF1A. In some embodiments, the CRISPR gene-editing system for the treatment of gout comprising one or more sgRNAs targeting an exon of eTNFRSF1A is delivered via one or more lipid nanoparticles (LNPs), the LNPs comprising an LNP system described herein, e.g., and without limitation, any one of LNP systems LNP001 to LNP240.

[0422] In some embodiments, the CRISPR gene-editing system for the treatment of gout comprises one or more sgRNAs targeting exon 1 of fTNFRSF1A. In some embodiments, the CRISPR gene-editing system for the treatment of gout comprises one or more sgRNAs targeting exon 2 of fTNFRSF1A. In some embodiments, the CRISPR gene-editing system for the treatment of gout comprises one or more sgRNAs targeting exon 3 of fTNFRSF1A. In some embodiments, the CRISPR gene-editing system for the treatment of gout comprises one or more sgRNAs targeting exon 4 of fTNFRSF1A. In some embodiments, the CRISPR gene-editing system for the treatment of gout comprises one or more sgRNAs targeting exon 5 of fTNFRSF1A. In some embodiments, the CRISPR gene-editing system for the treatment of gout comprises one or more sgRNAs targeting exon 6 of fTNFRSF1A. In some embodiments, the CRISPR gene-editing system for the treatment of gout comprises one or more sgRNAs targeting exon 7 of fTNFRSF1A. In some embodiments, the CRISPR gene-editing system for the treatment of gout comprises one or more sgRNAs targeting exon 8 of fTNFRSF1A. In some embodiments, the CRISPR gene-editing system for the treatment of gout comprises one or more sgRNAs targeting exon 9 of fTNFRSF1A. In some embodiments, the CRISPR gene-editing system for the treatment of gout comprises one or more sgRNAs targeting exon 10 of fTNFRSF1A. In some embodiments, the CRISPR gene-editing system for the treatment of gout comprising one or more sgRNAs targeting an exon of fTNFRSF1A is delivered via one or more lipid nanoparticles (LNPs), the LNPs comprising an LNP system described herein, e.g., and without limitation, any one of LNP systems LNP001 to LNP240.

[0423] In some embodiments, the CRISPR gene-editing system for the treatment of gout comprises one or more sgRNAs targeting TNFRSF1B. In some embodiments, the CRISPR gene-editing system for the treatment of gout comprises one or more sgRNAs targeting hTNFRSF1B. In some embodiments, the CRISPR gene-editing system for the treatment of gout comprises one or more sgRNAs targeting cTNFRSF1B. In some embodiments, the CRISPR gene-editing system for the treatment of gout comprises one or more sgRNAs targeting eTNFRSF1B. In some embodiments, the CRISPR gene-editing system for the treatment of gout comprises one or more sgRNAs targeting fTNFRSF1B. In some embodiments, the CRISPR gene-editing system for the treatment of gout comprising one or more sgRNAs targeting an exon of TNFRSF1B is delivered via one or more lipid nanoparticles (LNPs), the LNPs comprising an LNP system described herein, e.g., and without limitation, any one of LNP systems LNP001 to LNP240.

[0424] In some embodiments, the CRISPR gene-editing system for the treatment of gout comprises one or more sgRNAs targeting exon 1 of hTNFRSF1B. In some embodiments, the CRISPR gene-editing system for the treatment of gout comprises one or more sgRNAs targeting exon 2 of hTNFRSF1B. In some embodiments, the CRISPR gene-editing system for the treatment of gout comprises one or more sgRNAs targeting exon 3 of hTNFRSF1B. In some embodiments, the CRISPR gene-editing system for the treatment of gout comprises one or more sgRNAs targeting exon 4 of hTNFRSF1B. In some embodiments, the CRISPR gene-editing system for the treatment of gout comprises one or more sgRNAs targeting exon 5 of hTNFRSF1B. In some embodiments, the CRISPR gene-editing system for the treatment of gout comprises one or more sgRNAs targeting exon 6 of hTNFRSF1B. In some embodiments, the CRISPR gene-editing system for the treatment of gout comprises one or more sgRNAs targeting exon 7 of hTNFRSF1B. In some embodiments, the CRISPR gene-editing system for the treatment of gout comprises one or more sgRNAs targeting exon 8 of hTNFRSF1B. In some embodiments, the CRISPR gene-editing system for the treatment of gout comprises one or more sgRNAs targeting exon 9 of hTNFRSF1B. In some embodiments, the CRISPR gene-editing system for the treatment of gout comprises one or more sgRNAs targeting exon 10 of hTNFRSF1B. In some embodiments, the CRISPR gene-editing system for the treatment of gout comprises one or more sgRNAs targeting exon 11 of hTNFRSF1B In some embodiments, the CRISPR gene-editing system for the treatment of gout comprises one or more sgRNAs targeting exon 12 of hTNFRSF1B. In some embodiments, the CRISPR gene-editing system for the treatment of gout comprises one or more sgRNAs targeting exon 13 of hTNFRSF1B. In some embodiments, the CRISPR gene-editing system for the treatment of gout comprising one or more sgRNAs targeting an exon of hTNFRSF1B is delivered via one or more lipid nanoparticles (LNPs), the LNPs comprising an LNP system described herein, e.g., and without limitation, any one of LNP systems LNP001 to LNP240.

[0425] In some embodiments, the CRISPR gene-editing system for the treatment of gout comprises one or more sgRNAs targeting exon 1 of cTNFRSF1B. In some embodiments, the CRISPR gene-editing system for the treatment of gout comprises one or more sgRNAs targeting exon 2 of cTNFRSF1B. In some embodiments, the CRISPR gene-editing system for the treatment of gout comprises one or more sgRNAs targeting exon 3 of cTNFRSF1B. In some embodiments, the CRISPR gene-editing system for the treatment of gout comprises one or more sgRNAs targeting exon 4 of cTNFRSF1B. In some embodiments, the CRISPR gene-editing system for the treatment of gout comprises one or more sgRNAs targeting exon 5 of cTNFRSF1B. In some embodiments, the CRISPR gene-editing system for the treatment of gout comprises one or more sgRNAs targeting exon 6 of cTNFRSF1B. In some embodiments, the CRISPR gene-editing system for the treatment of gout comprises one or more sgRNAs targeting exon 7 of cTNFRSF1B. In some embodiments, the CRISPR gene-editing system for the treatment of gout comprises one or more sgRNAs targeting exon 8 of cTNFRSF1B. In some embodiments, the CRISPR gene-editing system for the treatment of gout comprises one or more sgRNAs targeting exon 9 of cTNFRSF1B. In some embodiments, the CRISPR gene-editing system for the treatment of gout comprises one or more sgRNAs targeting exon 10 of cTNFRSF1B. In some embodiments, the CRISPR gene-editing system for the treatment of gout comprises one or more sgRNAs targeting exon 11 of cTNFRSF1B. In some embodiments, the CRISPR gene-editing system for the treatment of gout comprising one or more sgRNAs targeting an exon of cTNFRSF1B is delivered via one or more lipid nanoparticles (LNPs), the LNPs comprising an LNP system described herein, e.g., and without limitation, any one of LNP systems LNP001 to LNP240.

[0426] In some embodiments, the CRISPR gene-editing system for the treatment of gout comprises one or more sgRNAs targeting exon 1 of eTNFRSF1B. In some embodiments, the CRISPR gene-editing system for the treatment of gout comprises one or more sgRNAs targeting exon 2 of eTNFRSF1B. In some embodiments, the CRISPR gene-editing system for the treatment of gout comprises one or more sgRNAs targeting exon 3 of eTNFRSF1B. In some embodiments, the CRISPR gene-editing system for the treatment of gout comprises one or more sgRNAs targeting exon 4 of eTNFRSF1B. In some embodiments, the CRISPR gene-editing system for the treatment of gout comprises one or more sgRNAs targeting exon 5 of eTNFRSF1B. In some embodiments, the CRISPR gene-editing system for the treatment of gout comprises one or more sgRNAs targeting exon 6 of eTNFRSF1B. In some embodiments, the CRISPR gene-editing system for the treatment of gout comprises one or more sgRNAs targeting exon 7 of eTNFRSF1B. In some embodiments, the CRISPR gene-editing system for the treatment of gout comprises one or more sgRNAs targeting exon 8 of eTNFRSF1B. In some embodiments, the CRISPR gene-editing system for the treatment of gout comprises one or more sgRNAs targeting exon 9 of eTNFRSF1B. In some embodiments, the CRISPR gene-editing system for the treatment of gout comprises one or more sgRNAs targeting exon 10 of eTNFRSF1B. In some embodiments, the CRISPR gene-editing system for the treatment of gout comprises one or more sgRNAs targeting exon 11 of eTNFRSF1B. In some embodiments, the CRISPR gene-editing system for the treatment of gout comprising one or more sgRNAs targeting an exon of eTNFRSF1B is delivered via one or more lipid nanoparticles (LNPs), the LNPs comprising an LNP system described herein, e.g., and without limitation, any one of LNP systems LNP001 to LNP240.

[0427] In some embodiments, the CRISPR gene-editing system for the treatment of gout comprises one or more sgRNAs targeting exon 1 of fTNFRSF1B. In some embodiments, the CRISPR gene-editing system for the treatment of gout comprises one or more sgRNAs targeting exon 2 of fTNFRSF1B. In some embodiments, the CRISPR gene-editing system for the treatment of gout comprises one or more sgRNAs targeting exon 3 of fTNFRSF1B. In some embodiments, the CRISPR gene-editing system for the treatment of gout comprises one or more sgRNAs targeting exon 4 of fTNFRSF1B. In some embodiments, the CRISPR gene-editing system for the treatment of gout comprises one or more sgRNAs targeting exon 5 of fTNFRSF1B. In some embodiments, the CRISPR gene-editing system for the treatment of gout comprises one or more sgRNAs targeting exon 6 of fTNFRSF1B. In some embodiments, the CRISPR gene-editing system for the treatment of gout comprises one or more sgRNAs targeting exon 7 of fTNFRSF1B. In some embodiments, the CRISPR gene-editing system for the treatment of gout comprises one or more sgRNAs targeting exon 8 of fTNFRSF1B. In some embodiments, the CRISPR gene-editing system for the treatment of gout comprises one or more sgRNAs targeting exon 9 of fTNFRSF1B. In some embodiments, the CRISPR gene-editing system for the treatment of gout comprises one or more sgRNAs targeting exon 10 of fTNFRSF1B. In some embodiments, the CRISPR gene-editing system for the treatment of gout comprising one or more sgRNAs targeting an exon of fTNFRSF1B is delivered via one or more lipid nanoparticles (LNPs), the LNPs comprising an LNP system described herein, e.g., and without limitation, any one of LNP systems LNP001 to LNP240.

[0428] In some embodiments, the CRISPR gene-editing system for the treatment of gout comprises one or more sgRNAs targeting TNFRSF3. In some embodiments, the CRISPR gene-editing system for the treatment of gout comprises one or more sgRNAs targeting hTNFRSF3. In some embodiments, the CRISPR gene-editing system for the treatment of gout comprises one or more sgRNAs targeting cTNFRSF3. In some embodiments, the CRISPR gene-editing system for the treatment of gout comprises one or more sgRNAs targeting eTNFRSF3. In some embodiments, the CRISPR gene-editing system for the treatment of gout comprises one or more sgRNAs targeting fTNFRSF3. In some embodiments, the CRISPR gene-editing system for the treatment of gout comprising one or more sgRNAs targeting an exon of TNFRSF3 is delivered via one or more lipid nanoparticles (LNPs), the LNPs comprising an LNP system described herein, e.g., and without limitation, any one of LNP systems LNP001 to LNP240.

[0429] In some embodiments, the CRISPR gene-editing system for the treatment of gout comprises one or more sgRNAs targeting exon 1 of hTNFRSF3. In some embodiments, the CRISPR gene-editing system for the treatment of gout comprises one or more sgRNAs targeting exon 2 of hTNFRSF3. In some embodiments, the CRISPR gene-editing system for the treatment of gout comprises one or more sgRNAs targeting exon 3 of hTNFRSF3. In some embodiments, the CRISPR gene-editing system for the treatment of gout comprises one or more sgRNAs targeting exon 4 of hTNFRSF3. In some embodiments, the CRISPR gene-editing system for the treatment of gout comprises one or more sgRNAs targeting exon 5 of hTNFRSF3. In some embodiments, the CRISPR gene-editing system for the treatment of gout comprises one or more sgRNAs targeting exon 6 of hTNFRSF3. In some embodiments, the CRISPR gene-editing system for the treatment of gout comprises one or more sgRNAs targeting exon 7 of hTNFRSF3. In some embodiments, the CRISPR gene-editing system for the treatment of gout comprises one or more sgRNAs targeting exon 8 of hTNFRSF3. In some embodiments, the CRISPR gene-editing system for the treatment of gout comprises one or more sgRNAs targeting exon 9 of hTNFRSF3. In some embodiments, the CRISPR gene-editing system for the treatment of gout comprises one or more sgRNAs targeting exon 10 of hTNFRSF3. In some embodiments, the CRISPR gene-editing system for the treatment of gout comprises one or more sgRNAs targeting exon 11 of hTNFRSF3. In some embodiments, the CRISPR gene-editing system for the treatment of gout comprises one or more sgRNAs targeting exon 12 of hTNFRSF3. In some embodiments, the CRISPR gene-editing system for the treatment of gout comprising one or more sgRNAs targeting an exon of hTNFRSF3 is delivered via one or more lipid nanoparticles (LNPs), the LNPs comprising an LNP system described herein, e.g., and without limitation, any one of LNP systems LNP001 to LNP240.

[0430] In some embodiments, the CRISPR gene-editing system for the treatment of gout comprises one or more sgRNAs targeting exon 1 of cTNFRSF3. In some embodiments, the CRISPR gene-editing system for the treatment of gout comprises one or more sgRNAs targeting exon 2 of cTNFRSF3. In some embodiments, the CRISPR gene-editing system for the treatment of gout comprises one or more sgRNAs targeting exon 3 of cTNFRSF3. In some embodiments, the CRISPR gene-editing system for the treatment of gout comprises one or more sgRNAs targeting exon 4 of cTNFRSF3. In some embodiments, the CRISPR gene-editing system for the treatment of gout comprises one or more sgRNAs targeting exon 5 of cTNFRSF3. In some embodiments, the CRISPR gene-editing system for the treatment of gout comprises one or more sgRNAs targeting exon 6 of cTNFRSF3. In some embodiments, the CRISPR gene-editing system for the treatment of gout comprises one or more sgRNAs targeting exon 7 of cTNFRSF3. In some embodiments, the CRISPR gene-editing system for the treatment of gout comprises one or more sgRNAs targeting exon 8 of cTNFRSF3. In some embodiments, the CRISPR gene-editing system for the treatment of gout comprises one or more sgRNAs targeting exon 9 of cTNFRSF3. In some embodiments, the CRISPR gene-editing system for the treatment of gout comprises one or more sgRNAs targeting exon 10 of cTNFRSF3. In some embodiments, the CRISPR gene-editing system for the treatment of gout comprising one or more sgRNAs targeting an exon of cTNFRSF3 is delivered via one or more lipid nanoparticles (LNPs), the LNPs comprising an LNP system described herein, e.g., and without limitation, any one of LNP systems LNP001 to LNP240.

[0431] In some embodiments, the CRISPR gene-editing system for the treatment of gout comprises one or more sgRNAs targeting exon 1 of eTNFRSF3. In some embodiments, the CRISPR gene-editing system for the treatment of gout comprises one or more sgRNAs targeting exon 2 of eTNFRSF3. In some embodiments, the CRISPR gene-editing system for the treatment of gout comprises one or more sgRNAs targeting exon 3 of eTNFRSF3. In some embodiments, the CRISPR gene-editing system for the treatment of gout comprises one or more sgRNAs targeting exon 4 of eTNFRSF3. In some embodiments, the CRISPR gene-editing system for the treatment of gout comprises one or more sgRNAs targeting exon 5 of eTNFRSF3. In some embodiments, the CRISPR gene-editing system for the treatment of gout comprises one or more sgRNAs targeting exon 6 of eTNFRSF3. In some embodiments, the CRISPR gene-editing system for the treatment of gout comprises one or more sgRNAs targeting exon 7 of eTNFRSF3. In some embodiments, the CRISPR gene-editing system for the treatment of gout comprises one or more sgRNAs targeting exon 8 of eTNFRSF3. In some embodiments, the CRISPR gene-editing system for the treatment of gout comprises one or more sgRNAs targeting exon 9 of eTNFRSF3. In some embodiments, the CRISPR gene-editing system for the treatment of gout comprises one or more sgRNAs targeting exon 10 of eTNFRSF3. In some embodiments, the CRISPR gene-editing system for the treatment of gout comprising one or more sgRNAs targeting an exon of eTNFRSF3 is delivered via one or more lipid nanoparticles (LNPs), the LNPs comprising an LNP system described herein, e.g., and without limitation, any one of LNP systems LNP001 to LNP240.

[0432] In some embodiments, the CRISPR gene-editing system for the treatment of gout comprises one or more sgRNAs targeting exon 1 of fTNFRSF3. In some embodiments, the CRISPR gene-editing system for the treatment of gout comprises one or more sgRNAs targeting exon 2 of fTNFRSF3. In some embodiments, the CRISPR gene-editing system for the treatment of gout comprises one or more sgRNAs targeting exon 3 of fTNFRSF3. In some embodiments, the CRISPR gene-editing system for the treatment of gout comprises one or more sgRNAs targeting exon 4 of fTNFRSF3. In some embodiments, the CRISPR gene-editing system for the treatment of gout comprises one or more sgRNAs targeting exon 5 of fTNFRSF3. In some embodiments, the CRISPR gene-editing system for the treatment of gout comprises one or more sgRNAs targeting exon 6 of fTNFRSF3. In some embodiments, the CRISPR gene-editing system for the treatment of gout comprises one or more sgRNAs targeting exon 7 of fTNFRSF3. In some embodiments, the CRISPR gene-editing system for the treatment of gout comprises one or more sgRNAs targeting exon 8 of fTNFRSF3. In some embodiments, the CRISPR gene-editing system for the treatment of gout comprises one or more sgRNAs targeting exon 9 of fTNFRSF3. In some embodiments, the CRISPR gene-editing system for the treatment of gout comprises one or more sgRNAs targeting exon 10 of fTNFRSF3. In some embodiments, the CRISPR gene-editing system for the treatment of gout comprising one or more sgRNAs targeting an exon of fTNFRSF3 is delivered via one or more lipid nanoparticles (LNPs), the LNPs comprising an LNP system described herein, e.g., and without limitation, any one of LNP systems LNP001 to LNP240.

[0433] In some embodiments, the CRISPR gene-editing system for the treatment of gout comprises one or more sgRNAs targeting TNFRSF4. In some embodiments, the CRISPR gene-editing system for the treatment of gout comprises one or more sgRNAs targeting hTNFRSF4. In some embodiments, the CRISPR gene-editing system for the treatment of gout comprises one or more sgRNAs targeting cTNFRSF4. In some embodiments, the CRISPR gene-editing system for the treatment of gout comprises one or more sgRNAs targeting eTNFRSF4. In some embodiments, the CRISPR gene-editing system for the treatment of gout comprises one or more sgRNAs targeting fTNFRSF4. In some embodiments, the CRISPR gene-editing system for the treatment of gout comprising one or more sgRNAs targeting an exon of TNFRSF4 is delivered via one or more lipid nanoparticles (LNPs), the LNPs comprising an LNP system described herein, e.g., and without limitation, any one of LNP systems LNP001 to LNP240.

[0434] In some embodiments, the CRISPR gene-editing system for the treatment of gout comprises one or more sgRNAs targeting exon 1 of hTNFRSF4. In some embodiments, the CRISPR gene-editing system for the treatment of gout comprises one or more sgRNAs targeting exon 2 of hTNFRSF4. In some embodiments, the CRISPR gene-editing system for the treatment of gout comprises one or more sgRNAs targeting exon 3 of hTNFRSF4. In some embodiments, the CRISPR gene-editing system for the treatment of gout comprises one or more sgRNAs targeting exon 4 of hTNFRSF4. In some embodiments, the CRISPR gene-editing system for the treatment of gout comprises one or more sgRNAs targeting exon 5 of hTNFRSF4. In some embodiments, the CRISPR gene-editing system for the treatment of gout comprises one or more sgRNAs targeting exon 6 of hTNFRSF4. In some embodiments, the CRISPR gene-editing system for the treatment of gout comprising one or more sgRNAs targeting an exon of hTNFRSF4 is delivered via one or more lipid nanoparticles (LNPs), the LNPs comprising an LNP system described herein, e.g., and without limitation, any one of LNP systems LNP001 to LNP240.

[0435] In some embodiments, the CRISPR gene-editing system for the treatment of gout comprises one or more sgRNAs targeting exon 1 of cTNFRSF4. In some embodiments, the CRISPR gene-editing system for the treatment of gout comprises one or more sgRNAs targeting exon 2 of cTNFRSF4. In some embodiments, the CRISPR gene-editing system for the treatment of gout comprises one or more sgRNAs targeting exon 3 of cTNFRSF4. In some embodiments, the CRISPR gene-editing system for the treatment of gout comprises one or more sgRNAs targeting exon 4 of cTNFRSF4. In some embodiments, the CRISPR gene-editing system for the treatment of gout comprises one or more sgRNAs targeting exon 5 of cTNFRSF4. In some embodiments, the CRISPR gene-editing system for the treatment of gout comprises one or more sgRNAs targeting exon 6 of cTNFRSF4. In some embodiments, the CRISPR gene-editing system for the treatment of gout comprises one or more sgRNAs targeting exon 7 of cTNFRSF4. In some embodiments, the CRISPR gene-editing system for the treatment of gout comprising one or more sgRNAs targeting an exon of cTNFRSF4 is delivered via one or more lipid nanoparticles (LNPs), the LNPs comprising an LNP system described herein, e.g., and without limitation, any one of LNP systems LNP001 to LNP240.

[0436] In some embodiments, the CRISPR gene-editing system for the treatment of gout comprises one or more sgRNAs targeting exon 1 of eTNFRSF4. In some embodiments, the CRISPR gene-editing system for the treatment of gout comprises one or more sgRNAs targeting exon 2 of eTNFRSF4. In some embodiments, the CRISPR gene-editing system for the treatment of gout comprises one or more sgRNAs targeting exon 3 of eTNFRSF4. In some embodiments, the CRISPR gene-editing system for the treatment of gout comprises one or more sgRNAs targeting exon 4 of eTNFRSF4. In some embodiments, the CRISPR gene-editing system for the treatment of gout comprises one or more sgRNAs targeting exon 5 of eTNFRSF4. In some embodiments, the CRISPR gene-editing system for the treatment of gout comprises one or more sgRNAs targeting exon 6 of eTNFRSF4. In some embodiments, the CRISPR gene-editing system for the treatment of gout comprises one or more sgRNAs targeting exon 7 of eTNFRSF4. In some embodiments, the CRISPR gene-editing system for the treatment of gout comprising one or more sgRNAs targeting an exon of eTNFRSF4 is delivered via one or more lipid nanoparticles (LNPs), the LNPs comprising an LNP system described herein, e.g., and without limitation, any one of LNP systems LNP001 to LNP240.

[0437] In some embodiments, the CRISPR gene-editing system for the treatment of gout comprises one or more sgRNAs targeting exon 1 of fTNFRSF4. In some embodiments, the CRISPR gene-editing system for the treatment of gout comprises one or more sgRNAs targeting exon 2 of fTNFRSF4. In some embodiments, the CRISPR gene-editing system for the treatment of gout comprises one or more sgRNAs targeting exon 3 of fTNFRSF4. In some embodiments, the CRISPR gene-editing system for the treatment of gout comprises one or more sgRNAs targeting exon 4 of fTNFRSF4. In some embodiments, the CRISPR gene-editing system for the treatment of gout comprises one or more sgRNAs targeting exon 5 of fTNFRSF4. In some embodiments, the CRISPR gene-editing system for the treatment of gout comprises one or more sgRNAs targeting exon 6 of fTNFRSF4. In some embodiments, the CRISPR gene-editing system for the treatment of gout comprises one or more sgRNAs targeting exon 7 of fTNFRSF4. In some embodiments, the CRISPR gene-editing system for the treatment of gout comprising one or more sgRNAs targeting an exon of fTNFRSF4 is delivered via one or more lipid nanoparticles (LNPs), the LNPs comprising an LNP system described herein, e.g., and without limitation, any one of LNP systems LNP001 to LNP240.

[0438] In some embodiments, the CRISPR gene-editing system for the treatment of gout comprises one or more sgRNAs targeting TNFRSF11A. In some embodiments, the CRISPR gene-editing system for the treatment of gout comprises one or more sgRNAs targeting hTNFRSF11A. In some embodiments, the CRISPR gene-editing system for the treatment of gout comprises one or more sgRNAs targeting cTNFRSF11A. In some embodiments, the CRISPR gene-editing system for the treatment of gout comprises one or more sgRNAs targeting eTNFRSF11A. In some embodiments, the CRISPR gene-editing system for the treatment of gout comprises one or more sgRNAs targeting fTNFRSF11A. In some embodiments, the CRISPR gene-editing system for the treatment of gout comprising one or more sgRNAs targeting an exon of TNFRSF11A is delivered via one or more lipid nanoparticles (LNPs), the LNPs comprising an LNP system described herein, e.g., and without limitation, any one of LNP systems LNP001 to LNP240.

[0439] In some embodiments, the CRISPR gene-editing system for the treatment of gout comprises one or more sgRNAs targeting exon 1 of hTNFRSF11A. In some embodiments, the CRISPR gene-editing system for the treatment of gout comprises one or more sgRNAs targeting exon 2 of hTNFRSF11A. In some embodiments, the CRISPR gene-editing system for the treatment of gout comprises one or more sgRNAs targeting exon 3 of hTNFRSF11A. In some embodiments, the CRISPR gene-editing system for the treatment of gout comprises one or more sgRNAs targeting exon 4 of hTNFRSF11A. In some embodiments, the CRISPR gene-editing system for the treatment of gout comprises one or more sgRNAs targeting exon 5 of hTNFRSF11A. In some embodiments, the CRISPR gene-editing system for the treatment of gout comprises one or more sgRNAs targeting exon 6 of hTNFRSF11A. In some embodiments, the CRISPR gene-editing system for the treatment of gout comprises one or more sgRNAs targeting exon 7 of hTNFRSF11A. In some embodiments, the CRISPR gene-editing system for the treatment of gout comprises one or more sgRNAs targeting exon 8 of hTNFRSF11A. In some embodiments, the CRISPR gene-editing system for the treatment of gout comprises one or more sgRNAs targeting exon 9 of hTNFRSF11A. In some embodiments, the CRISPR gene-editing system for the treatment of gout comprises one or more sgRNAs targeting exon 10 of hTNFRSF11A. In some embodiments, the CRISPR gene-editing system for the treatment of gout comprises one or more sgRNAs targeting exon 11 of hTNFRSF11A. In some embodiments, the CRISPR gene-editing system for the treatment of gout comprises one or more sgRNAs targeting exon 12 of hTNFRSF11A. In some embodiments, the CRISPR gene-editing system for the treatment of gout comprising one or more sgRNAs targeting an exon of hTNFRSF11A is delivered via one or more lipid nanoparticles (LNPs), the LNPs comprising an LNP system described herein, e.g., and without limitation, any one of LNP systems LNP001 to LNP240.

[0440] In some embodiments, the CRISPR gene-editing system for the treatment of gout comprises one or more sgRNAs targeting exon 1 of cTNFRSF11A. In some embodiments, the CRISPR gene-editing system for the treatment of gout comprises one or more sgRNAs targeting exon 2 of cTNFRSF11A. In some embodiments, the CRISPR gene-editing system for the treatment of gout comprises one or more sgRNAs targeting exon 3 of cTNFRSF11A. In some embodiments, the CRISPR gene-editing system for the treatment of gout comprises one or more sgRNAs targeting exon 4 of cTNFRSF11A. In some embodiments, the CRISPR gene-editing system for the treatment of gout comprises one or more sgRNAs targeting exon 5 of cTNFRSF11A. In some embodiments, the CRISPR gene-editing system for the treatment of gout comprises one or more sgRNAs targeting exon 6 of cTNFRSF11A. In some embodiments, the CRISPR gene-editing system for the treatment of gout comprises one or more sgRNAs targeting exon 7 of cTNFRSF11A. In some embodiments, the CRISPR gene-editing system for the treatment of gout comprises one or more sgRNAs targeting exon 8 of cTNFRSF11A. In some embodiments, the CRISPR gene-editing system for the treatment of gout comprises one or more sgRNAs targeting exon 9 of cTNFRSF11A. In some embodiments, the CRISPR gene-editing system for the treatment of gout comprises one or more sgRNAs targeting exon 10 of cTNFRSF11A. In some embodiments, the CRISPR gene-editing system for the treatment of gout comprises one or more sgRNAs targeting exon 11 of cTNFRSF11A. In some embodiments, the CRISPR gene-editing system for the treatment of gout comprising one or more sgRNAs targeting an exon of cTNFRSF11A is delivered via one or more lipid nanoparticles (LNPs), the LNPs comprising an LNP system described herein, e.g., and without limitation, any one of LNP systems LNP001 to LNP240.

[0441] In some embodiments, the CRISPR gene-editing system for the treatment of gout comprises one or more sgRNAs targeting exon 1 of eTNFRSF11A. In some embodiments, the CRISPR gene-editing system for the treatment of gout comprises one or more sgRNAs targeting exon 2 of eTNFRSF11A. In some embodiments, the CRISPR gene-editing system for the treatment of gout comprises one or more sgRNAs targeting exon 3 of eTNFRSF11A. In some embodiments, the CRISPR gene-editing system for the treatment of gout comprises one or more sgRNAs targeting exon 4 of eTNFRSF11A. In some embodiments, the CRISPR gene-editing system for the treatment of gout comprises one or more sgRNAs targeting exon 5 of eTNFRSF11A. In some embodiments, the CRISPR gene-editing system for the treatment of gout comprises one or more sgRNAs targeting exon 6 of eTNFRSF11A. In some embodiments, the CRISPR gene-editing system for the treatment of gout comprises one or more sgRNAs targeting exon 7 of eTNFRSF11A. In some embodiments, the CRISPR gene-editing system for the treatment of gout comprises one or more sgRNAs targeting exon 8 of eTNFRSF11A. In some embodiments, the CRISPR gene-editing system for the treatment of gout comprises one or more sgRNAs targeting exon 9 of eTNFRSF11A. In some embodiments, the CRISPR gene-editing system for the treatment of gout comprises one or more sgRNAs targeting exon 10 of eTNFRSF11A. In some embodiments, the CRISPR gene-editing system for the treatment of gout comprising one or more sgRNAs targeting an exon of eTNFRSF11A is delivered via one or more lipid nanoparticles (LNPs), the LNPs comprising an LNP system described herein, e.g., and without limitation, any one of LNP systems LNP001 to LNP240.

[0442] In some embodiments, the CRISPR gene-editing system for the treatment of gout comprises one or more sgRNAs targeting exon t of fTNFRSF11A. In some embodiments, the CRISPR gene-editing system for the treatment of gout comprises one or more sgRNAs targeting exon 2 of fTNFRSF11A. In some embodiments, the CRISPR gene-editing system for the treatment of gout comprises one or more sgRNAs targeting exon 3 of fTNFRSF11A. In some embodiments, the CRISPR gene-editing system for the treatment of gout comprises one or more sgRNAs targeting exon 4 of fTNFRSF11A. In some embodiments, the CRISPR gene-editing system for the treatment of gout comprises one or more sgRNAs targeting exon 5 of fTNFRSF11A. In some embodiments, the CRISPR gene-editing system for the treatment of gout comprises one or more sgRNAs targeting exon 6 of fTNFRSF11A. In some embodiments, the CRISPR gene-editing system for the treatment of gout comprises one or more sgRNAs targeting exon 7 of fTNFRSF11A. In some embodiments, the CRISPR gene-editing system for the treatment of gout comprises one or more sgRNAs targeting exon 8 of fTNFRSF11A. In some embodiments, the CRISPR gene-editing system for the treatment of gout comprises one or more sgRNAs targeting exon 9 of fTNFRSF11A. In some embodiments, the CRISPR gene-editing system for the treatment of gout comprises one or more sgRNAs targeting exon 10 of fTNFRSF11A. In some embodiments, the CRISPR gene-editing system for the treatment of gout comprises one or more sgRNAs targeting exon 11 of fTNFRSF11A. In some embodiments, the CRISPR gene-editing system for the treatment of gout comprising one or more sgRNAs targeting an exon of fTNFRSF11A is delivered via one or more lipid nanoparticles (LNPs), the LNPs comprising an LNP system described herein, e.g., and without limitation, any one of LNP systems LNP001 to LNP240.

### V. Back or Spine Conditions or Disorders

### A. Introduction

[0443] Back or spine conditions or disorders, including low back pain, cervical pain, sacral pain, thoracic pain. and pain or inflammation associated with discogenic disorders e.g., degenerative disc disease (DDD) or internal disc disruption (IDD), are a major cause of morbidity and disability worldwide for which few long-term options for amelioration currently exist. Andersson GB. Epidemiological features of chronic low-back pain. Lancet. 1999; 354:581-585. Presently available treatments include surgical or less invasive options that often fail to offer long-term palliation. Ju, et al. Global Spine Journal (2020): 2192568220963058. All vertebrate species are affected by back or spine conditions or disorders, including working animals, domestic pets, and their owners. All suffer from the associated discomfort, pain, and disability, depending on the degree of disease progression.

[0444] Back or spine conditions or disorders, such as low back pain, are complex diseases characterized by a multitude of inputs contributing to a progressive course of disability. Among these contributors are morphological irregularities (e.g., disc disruptions), inflammation, changes in the localized cellular environment (e.g., vascularization and/or innervation) and degenerative changes. Peng, Bao-Gan. World Journal of Orthopedics 4.2 (2013): 42. Each contributing factor is driven by differential expression of various gene products, including at least pro-inflammatory cytokines, growth factors, pain signaling molecules, and other effector biomolecules. There is a pressing need for new methods and compositions to treat this spectrum of disease and its associated disability.

[0445] The present disclosure provides compositions and methods for back or spine conditions or disorders. Particularly, said conditions are treated by reducing pro-inflammatory signaling mediated by inflammatory cytokines, such as, IL1α, IL1β, TNF-α, IL6, IL8, IL18, IL33, matrix metalloproteinases (MMPs), or TGFB1, or TGFB2, binding to their cognate receptor(s). In some embodiments, such conditions or disorders include disorders of the intervertebral discs (IVDs). In some embodiments, the condition or disorder is DDD. In some embodiments, the condition or disorder is IDD. In some embodiments, the condition or disorder is low back pain. Some embodiments are further useful as it relates to encapsulation in an LNP system described herein, e.g., and without limitation, any one of LNP systems LNP001 to LNP240.

[0446] Among the advantages of the present disclosure over treatments currently available for mammals afflicted with back or spine conditions or disorders include the period of relief from symptoms. Upon local administration (e.g., intradiscal injection) and subsequent genetic editing of a cell (e.g., a chondrocyte, a tenocyte, an osteocyte, a monocyte, a macrophage or the cells of the nucleus pulposus or annulus fibrosus), pro-inflammatory signaling is silenced through the targeted gene for the life of that cell. By contrast, biologic treatments require periodic dosing, which may magnify the impact of any side effects, which can be severe. Among various genetic approaches, the present disclosure is also superior due to the resistance to leakiness built in by virtue of modifying a protein receptor, rather than ablating its expression altogether.

### B. Low Back Pain

[0447] In one aspect, the present disclosure encompasses treatments for low back pain. In some embodiments, the low back pain treatment comprises a therapeutically effective amount of a Clustered Regularly Interspaced Short Palindromic Repeats (CRISPR) gene-editing system, the system comprising: (i) a CRISPR Associated (Cas) protein; and (ii) at least one guide RNA targeting IL1R1. In some embodiments, the low back pain treatment comprises a CRISPR gene-editing system targeting hIL1R1. In some embodiments, the low back pain treatment comprises a CRISPR gene-editing system targeting cIL1R1. In some embodiments, the low back pain treatment comprises a CRISP gene-editing system R targeting eIL1R1. In some embodiments, the low back pain treatment comprises a CRISPR gene-editing system targeting fIL1R1. In some embodiments, the CRISPR gene-editing system for the treatment of low back pain comprising one or more sgRNAs targeting an exon of IL1R1 is delivered via one or more lipid nanoparticles (LNPs), the LNPs comprising an LNP system described herein, e.g., and without limitation, any one of LNP systems LNP001 to LNP240.

[0448] In some embodiments, the CRISPR gene-editing system for the treatment of low back pain comprises one or more sgRNAs targeting exon 1 of hIL1R1. In some embodiments, the CRISPR gene-editing system for the treatment of low back pain comprises one or more sgRNAs targeting exon 2 of hIL1R1. In some embodiments, the CRISPR gene-editing system for the treatment of low back pain comprises one or more sgRNAs targeting exon 3 of hIL1R1. In some embodiments, the CRISPR gene-editing system for the treatment of low back pain comprises one or more sgRNAs targeting exon 4 of hIL1R1. In some embodiments, the CRISPR gene-editing system for the treatment of low back pain comprises one or more sgRNAs targeting exon 5 of hIL1R1. In some embodiments, the CRISPR gene-editing system for the treatment of low back pain comprises one or more sgRNAs targeting exon 6 of hIL1R1. In some embodiments, the CRISPR gene-editing system for the treatment of low back pain comprises one or more sgRNAs targeting exon 7 of hIL1R1. In some embodiments, the CRISPR gene-editing system for the treatment of low back pain comprises one or more sgRNAs targeting exon 8 of hIL1R1. In some embodiments, the CRISPR gene-editing system for the treatment of low back pain comprises one or more sgRNAs targeting exon 9 of hIL1R1. In some embodiments, the CRISPR gene-editing system for the treatment of low back pain comprises one or more sgRNAs targeting exon 10 of hIL1R1. In some embodiments, the CRISPR gene-editing system for the treatment of low back pain comprises one or more sgRNAs targeting exon 11 of hIL1R1. In some embodiments, the CRISPR gene-editing system for the treatment of low back pain comprises one or more sgRNAs targeting exon 12 of hIL1R1. In some embodiments, the CRISPR gene-editing system for the treatment of low back pain comprises one or more sgRNAs targeting exon 13 of hIL1R1. In some embodiments, the CRISPR gene-editing system for the treatment of low back pain comprises one or more sgRNAs targeting exon 14 of hIL1R1. In some embodiments, the CRISPR gene-editing system for the treatment of low back pain comprises one or more sgRNAs targeting exon 15 of hIL1R1. In some embodiments, the CRISPR gene-editing system for the treatment of low back pain comprises one or more sgRNAs targeting exon 16 of hIL1R1. In some embodiments, the CRISPR gene-editing system for the treatment of low back pain comprises one or more sgRNAs targeting exon 17 of hIL1R1. In some embodiments, the CRISPR gene-editing system for the treatment of low back pain comprises one or more sgRNAs targeting exon 18 of hIL1R1. In some embodiments, the CRISPR gene-editing system for the treatment of low back pain comprises one or more sgRNAs targeting exon 19 of hIL1R1. In some embodiments, the CRISPR gene-editing system for the treatment of low back pain comprises one or more sgRNAs targeting exon 20 of hIL1R1. In some embodiments, the CRISPR gene-editing system for the treatment of low back pain comprises one or more sgRNAs targeting exon 21 of hIL1R1. In some embodiments, the CRISPR gene-editing system for the treatment of low back pain comprising one or more sgRNAs targeting an exon of hIL1R1 is delivered via one or more lipid nanoparticles (LNPs), the LNPs comprising an LNP system described herein, e.g., and without limitation, any one of LNP systems LNP001 to LNP240.

[0449] In some embodiments, the CRISPR gene-editing system for the treatment of low back pain comprises one or more sgRNAs targeting exon 1 of cIL1R1. In some embodiments, the CRISPR gene-editing system for the treatment of low back pain comprises one or more sgRNAs targeting exon 2 of cIL1R1. In some embodiments, the CRISPR gene-editing system for the treatment of low back pain comprises one or more sgRNAs targeting exon 3 of cIL1R1. In some embodiments, the CRISPR gene-editing system for the treatment of low back pain comprises one or more sgRNAs targeting exon 4 of cIL1R1. In some embodiments, the CRISPR gene-editing system for the treatment of low back pain comprises one or more sgRNAs targeting exon 5 of cIL1R1. In some embodiments, the CRISPR gene-editing system for the treatment of low back pain comprises one or more sgRNAs targeting exon 6 of cIL1R1. In some embodiments, the CRISPR gene-editing system for the treatment of low back pain comprises one or more sgRNAs targeting exon 7 of cIL1R1. In some embodiments, the CRISPR gene-editing system for the treatment of low back pain comprises one or more sgRNAs targeting exon 8 of cIL1R1. In some embodiments, the CRISPR gene-editing system for the treatment of low back pain comprises one or more sgRNAs targeting exon 9 of cIL1R1. In some embodiments, the CRISPR gene-editing system for the treatment of low back pain comprises one or more sgRNAs targeting exon 10 of cIL1R1. In some embodiments, the CRISPR gene-editing system for the treatment of low back pain comprises one or more sgRNAs targeting exon 11 of cIL1R1. In some embodiments, the CRISPR gene-editing system for the treatment of low back pain comprises one or more sgRNAs targeting exon 12 of cIL1R1. In some embodiments, the CRISPR gene-editing system for the treatment of low back pain comprises one or more sgRNAs targeting exon 13 of cIL1R1. In some embodiments, the CRISPR gene-editing system for the treatment of low back pain comprises one or more sgRNAs targeting exon 14 of cIL1R1. In some embodiments, the CRISPR gene-editing system for the treatment of low back pain comprises one or more sgRNAs targeting exon 15 of cIL1R1. In some embodiments, the CRISPR gene-editing system for the treatment of low back pain comprises one or more sgRNAs targeting exon 16 of cIL1R1. In some embodiments, the CRISPR gene-editing system for the treatment of low back pain comprising one or more sgRNAs targeting an exon of cIL1R1 is delivered via one or more lipid nanoparticles (LNPs), the LNPs comprising an LNP system described herein, e.g., and without limitation, any one of LNP systems LNP001 to LNP240.

[0450] In some embodiments, the CRISPR gene-editing system for the treatment of low back pain comprises one or more sgRNAs targeting exon 1 of eIL1R1. In some embodiments, the CRISPR gene-editing system for the treatment of low back pain comprises one or more sgRNAs targeting exon 2 of eIL1R1. In some embodiments, the CRISPR gene-editing system for the treatment of low back pain comprises one or more sgRNAs targeting exon 3 of eIL1R1. In some embodiments, the CRISPR gene-editing system for the treatment of low back pain comprises one or more sgRNAs targeting exon 4 of eIL1R1. In some embodiments, the CRISPR gene-editing system for the treatment of low back pain comprises one or more sgRNAs targeting exon 5 of eIL1R1. In some embodiments, the CRISPR gene-editing system for the treatment of low back pain comprises one or more sgRNAs targeting exon 6 of eIL1R1. In some embodiments, the CRISPR gene-editing system for the treatment of low back pain comprises one or more sgRNAs targeting exon 7 of eIL1R1. In some embodiments, the CRISPR gene-editing system for the treatment of low back pain comprises one or more sgRNAs targeting exon 8 of eIL1R1. In some embodiments, the CRISPR gene-editing system for the treatment of low back pain comprises one or more sgRNAs targeting exon 9 of eIL1R1. In some embodiments, the CRISPR gene-editing system for the treatment of low back pain comprises one or more sgRNAs targeting exon 10 of eIL1R1. In some embodiments, the CRISPR gene-editing system for the treatment of low back pain comprises one or more sgRNAs targeting exon 11 of eIL1R1. In some embodiments, the CRISPR gene-editing system for the treatment of low back pain comprises one or more sgRNAs targeting exon 12 of eIL1R1. In some embodiments, the CRISPR gene-editing system for the treatment of low back pain comprises one or more sgRNAs targeting exon 13 of eIL1R1. In some embodiments, the CRISPR gene-editing system for the treatment of low back pain comprises one or more sgRNAs targeting exon 14 of eIL1R1. In some embodiments, the CRISPR gene-editing system for the treatment of low back pain comprises one or more sgRNAs targeting exon 15 of eIL1R1. In some embodiments, the CRISPR gene-editing system for the treatment of low back pain comprising one or more sgRNAs targeting an exon of eIL1R1 is delivered via one or more lipid nanoparticles (LNPs), the LNPs comprising an LNP system described herein, e.g., and without limitation, any one of LNP systems LNP001 to LNP240.

[0451] In some embodiments, the CRISPR gene-editing system for the treatment of low back pain comprises one or more sgRNAs targeting exon 1 of fIL1R1. In some embodiments, the CRISPR gene-editing system for the treatment of low back pain comprises one or more sgRNAs targeting exon 2 of fIL1R1. In some embodiments, the CRISPR gene-editing system for the treatment of low back pain comprises one or more sgRNAs targeting exon 3 of fIL1R1. In some embodiments, the CRISPR gene-editing system for the treatment of low back pain comprises one or more sgRNAs targeting exon 4 of fIL1R1. In some embodiments, the CRISPR gene-editing system for the treatment of low back pain comprises one or more sgRNAs targeting exon 5 of fIL1R1. In some embodiments, the CRISPR gene-editing system for the treatment of low back pain comprises one or more sgRNAs targeting exon 6 of fIL1R1. In some embodiments, the CRISPR gene-editing system for the treatment of low back pain comprises one or more sgRNAs targeting exon 7 of fIL1R1. In some embodiments, the CRISPR gene-editing system for the treatment of low back pain comprises one or more sgRNAs targeting exon 8 of fIL1R1. In some embodiments, the CRISPR gene-editing system for the treatment of low back pain comprises one or more sgRNAs targeting exon 9 of fIL1R1. In some embodiments, the CRISPR gene-editing system for the treatment of low back pain comprises one or more sgRNAs targeting exon 10 of fIL1R1. In some embodiments, the CRISPR gene-editing system for the treatment of low back pain comprises one or more sgRNAs targeting exon 11 of fIL1R1. In some embodiments, the CRISPR gene-editing system for the treatment of low back pain comprises one or more sgRNAs targeting exon 12 of fIL1R1. In some embodiments, the CRISPR gene-editing system for the treatment of low back pain comprises one or more sgRNAs targeting exon 13 of fIL1R1. In some embodiments, the CRISPR gene-editing system for the treatment of low back pain comprises one or more sgRNAs targeting exon 14 of fIL1R1. In some embodiments, the CRISPR gene-editing system for the treatment of low back pain comprises one or more sgRNAs targeting exon 15 of fIL1R1. In some embodiments, the CRISPR gene-editing system for the treatment of low back pain comprises one or more sgRNAs targeting exon 16 of fIL1R1. In some embodiments, the CRISPR gene-editing system for the treatment of low back pain comprises one or more sgRNAs targeting exon 17 of fIL1R1. In some embodiments, the CRISPR gene-editing system for the treatment of low back pain comprises one or more sgRNAs targeting exon 18 of fIL1R1. In some embodiments, the CRISPR gene-editing system for the treatment of low back pain comprising one or more sgRNAs targeting an exon of fIL1R1 is delivered via one or more lipid nanoparticles (LNPs), the LNPs comprising an LNP system described herein, e.g., and without limitation, any one of LNP systems LNP001 to LNP240.

[0452] In some embodiments, the CRISPR gene-editing system for the treatment of low back pain comprises one or more sgRNAs targeting IL1RAP. In some embodiments, the CRISPR gene-editing system for the treatment of low back pain comprises one or more sgRNAs targeting hIL1RAP. In some embodiments, the CRISPR gene-editing system for the treatment of low back pain comprises one or more sgRNAs targeting cIL1RAP. In some embodiments, the CRISPR gene-editing system for the treatment of low back pain comprises one or more sgRNAs targeting eIL1RAP. In some embodiments, the CRISPR gene-editing system for the treatment of low back pain comprises one or more sgRNAs targeting fIL1RAP. In some embodiments, the CRISPR gene-editing system for the treatment of low back pain comprising one or more sgRNAs targeting an exon of IL1RAP is delivered via one or more lipid nanoparticles (LNPs), the LNPs comprising an LNP system described herein, e.g., and without limitation, any one of LNP systems LNP001 to LNP240.

[0453] In some embodiments, the CRISPR gene-editing system for the treatment of low back pain comprises one or more sgRNAs targeting exon 1 of hIL1RAP. In some embodiments, the CRISPR gene-editing system for the treatment of low back pain comprises one or more sgRNAs targeting exon 2 of hIL1RAP. In some embodiments, the CRISPR gene-editing system for the treatment of low back pain comprises one or more sgRNAs targeting exon 3 of hIL1RAP. In some embodiments, the CRISPR gene-editing system for the treatment of low back pain comprises one or more sgRNAs targeting exon 4 of hIL1RAP. In some embodiments, the CRISPR gene-editing system for the treatment of low back pain comprises one or more sgRNAs targeting exon 5 of hIL1RAP. In some embodiments, the CRISPR gene-editing system for the treatment of low back pain comprises one or more sgRNAs targeting exon 6 of hIL1RAP. In some embodiments, the CRISPR gene-editing system for the treatment of low back pain comprises one or more sgRNAs targeting exon 7 of hIL1RAP. In some embodiments, the CRISPR gene-editing system for the treatment of low back pain comprises one or more sgRNAs targeting exon 8 of hIL1RAP. In some embodiments, the CRISPR gene-editing system for the treatment of low back pain comprises one or more sgRNAs targeting exon 9 of hIL1RAP. In some embodiments, the CRISPR gene-editing system for the treatment of low back pain comprises one or more sgRNAs targeting exon 10 of hIL1RAP. In some embodiments, the CRISPR gene-editing system for the treatment of low back pain comprises one or more sgRNAs targeting exon 11 of hIL1RAP. In some embodiments, the CRISPR gene-editing system for the treatment of low back pain comprises one or more sgRNAs targeting exon 12 of hIL1RAP. In some embodiments, the CRISPR gene-editing system for the treatment of low back pain comprises one or more sgRNAs targeting exon 13 of hIL1RAP. In some embodiments, the CRISPR gene-editing system for the treatment of low back pain comprises one or more sgRNAs targeting exon 14 of hIL1RAP. In some embodiments, the CRISPR gene-editing system for the treatment of low back pain comprises one or more sgRNAs targeting exon 15 of hIL1RAP. In some embodiments, the CRISPR gene-editing system for the treatment of low back pain comprises one or more sgRNAs targeting exon 16 of hIL1RAP. In some embodiments, the CRISPR gene-editing system for the treatment of low back pain comprises one or more sgRNAs targeting exon 17 of hIL1RAP. In some embodiments, the CRISPR gene-editing system for the treatment of low back pain comprising one or more sgRNAs targeting an exon of hIL1RAP is delivered via one or more lipid nanoparticles (LNPs), the LNPs comprising an LNP system described herein, e.g., and without limitation, any one of LNP systems LNP001 to LNP240.

[0454] In some embodiments, the CRISPR gene-editing system for the treatment of low back pain comprises one or more sgRNAs targeting exon 1 of cIL1RAP. In some embodiments, the CRISPR gene-editing system for the treatment of low back pain comprises one or more sgRNAs targeting exon 2 of cIL1RAP. In some embodiments, the CRISPR gene-editing system for the treatment of low back pain comprises one or more sgRNAs targeting exon 3 of cIL1RAP. In some embodiments, the CRISPR gene-editing system for the treatment of low back pain comprises one or more sgRNAs targeting exon 4 of cIL1RAP. In some embodiments, the CRISPR gene-editing system for the treatment of low back pain comprises one or more sgRNAs targeting exon 5 of cIL1RAP. In some embodiments, the CRISPR gene-editing system for the treatment of low back pain comprises one or more sgRNAs targeting exon 6 of cIL1RAP. In some embodiments, the CRISPR gene-editing system for the treatment of low back pain comprises one or more sgRNAs targeting exon 7 of cIL1RAP. In some embodiments, the CRISPR gene-editing system for the treatment of low back pain comprises one or more sgRNAs targeting exon 8 of cIL1RAP. In some embodiments, the CRISPR gene-editing system for the treatment of low back pain comprises one or more sgRNAs targeting exon 9 of cIL1RAP. In some embodiments, the CRISPR gene-editing system for the treatment of low back pain comprises one or more sgRNAs targeting exon 10 of cIL1RAP. In some embodiments, the CRISPR gene-editing system for the treatment of low back pain comprises one or more sgRNAs targeting exon 11 of cIL1RAP. In some embodiments, the CRISPR gene-editing system for the treatment of low back pain comprises one or more sgRNAs targeting exon 12 of cIL1RAP. In some embodiments, the CRISPR gene-editing system for the treatment of low back pain comprises one or more sgRNAs targeting exon 13 of cIL1RAP. In some embodiments, the CRISPR gene-editing system for the treatment of low back pain comprises one or more sgRNAs targeting exon 14 of cIL1RAP. In some embodiments, the CRISPR gene-editing system for the treatment of low back pain comprises one or more sgRNAs targeting exon 15 of cIL1RAP. In some embodiments, the CRISPR gene-editing system for the treatment of low back pain comprises one or more sgRNAs targeting exon 16 of cIL1RAP. In some embodiments, the CRISPR gene-editing system for the treatment of low back pain comprising one or more sgRNAs targeting an exon of cIL1RAP is delivered via one or more lipid nanoparticles (LNPs), the LNPs comprising an LNP system described herein, e.g., and without limitation, any one of LNP systems LNP001 to LNP240.

[0455] In some embodiments, the CRISPR gene-editing system for the treatment of low back pain comprises one or more sgRNAs targeting exon 1 of eIL1RAP. In some embodiments, the CRISPR gene-editing system for the treatment of low back pain comprises one or more sgRNAs targeting exon 2 of eIL1RAP. In some embodiments, the CRISPR gene-editing system for the treatment of low back pain comprises one or more sgRNAs targeting exon 3 of eIL1RAP. In some embodiments, the CRISPR gene-editing system for the treatment of low back pain comprises one or more sgRNAs targeting exon 4 of eIL1RAP. In some embodiments, the CRISPR gene-editing system for the treatment of low back pain comprises one or more sgRNAs targeting exon 5 of eIL1RAP. In some embodiments, the CRISPR gene-editing system for the treatment of low back pain comprises one or more sgRNAs targeting exon 6 of eIL1RAP. In some embodiments, the CRISPR gene-editing system for the treatment of low back pain comprises one or more sgRNAs targeting exon 7 of eIL1RAP. In some embodiments, the CRISPR gene-editing system for the treatment of low back pain comprises one or more sgRNAs targeting exon 8 of eIL1RAP. In some embodiments, the CRISPR gene-editing system for the treatment of low back pain comprises one or more sgRNAs targeting exon 9 of eIL1RAP. In some embodiments, the CRISPR gene-editing system for the treatment of low back pain comprises one or more sgRNAs targeting exon 10 of eIL1RAP. In some embodiments, the CRISPR gene-editing system for the treatment of low back pain comprises one or more sgRNAs targeting exon 11 of eIL1RAP. In some embodiments, the CRISPR gene-editing system for the treatment of low back pain comprises one or more sgRNAs targeting exon 12 of eIL1RAP. In some embodiments, the CRISPR gene-editing system for the treatment of low back pain comprises one or more sgRNAs targeting exon 13 of eIL1RAP. In some embodiments, the CRISPR gene-editing system for the treatment of low back pain comprising one or more sgRNAs targeting an exon of eIL1RAP is delivered via one or more lipid nanoparticles (LNPs), the LNPs comprising an LNP system described herein, e.g., and without limitation, any one of LNP systems LNP001 to LNP240.

[0456] In some embodiments, the CRISPR gene-editing system for the treatment of low back pain comprises one or more sgRNAs targeting exon 1 of fIL1RAP. In some embodiments, the CRISPR gene-editing system for the treatment of low back pain comprises one or more sgRNAs targeting exon 2 of fIL1RAP. In some embodiments, the CRISPR gene-editing system for the treatment of low back pain comprises one or more sgRNAs targeting exon 3 of fIL1RAP. In some embodiments, the CRISPR gene-editing system for the treatment of low back pain comprises one or more sgRNAs targeting exon 4 of fIL1RAP. In some embodiments, the CRISPR gene-editing system for the treatment of low back pain comprises one or more sgRNAs targeting exon 5 of fIL1RAP. In some embodiments, the CRISPR gene-editing system for the treatment of low back pain comprises one or more sgRNAs targeting exon 6 of fIL1RAP. In some embodiments, the CRISPR gene-editing system for the treatment of low back pain comprises one or more sgRNAs targeting exon 7 of fIL1RAP. In some embodiments, the CRISPR gene-editing system for the treatment of low back pain comprises one or more sgRNAs targeting exon 8 of fIL1RAP. In some embodiments, the CRISPR gene-editing system for the treatment of low back pain comprises one or more sgRNAs targeting exon 9 of fIL1RAP. In some embodiments, the CRISPR gene-editing system for the treatment of low back pain comprises one or more sgRNAs targeting exon 10 of fIL1RAP. In some embodiments, the CRISPR gene-editing system for the treatment of low back pain comprises one or more sgRNAs targeting exon 11 of fIL1RAP. In some embodiments, the CRISPR gene-editing system for the treatment of low back pain comprises one or more sgRNAs targeting exon 12 of fIL1RAP. In some embodiments, the CRISPR gene-editing system for the treatment of low back pain comprises one or more sgRNAs targeting exon 13 of fIL1RAP. In some embodiments, the CRISPR gene-editing system for the treatment of low back pain comprises one or more sgRNAs targeting exon 14 of fIL1RAP. In some embodiments, the CRISPR gene-editing system for the treatment of low back pain comprising one or more sgRNAs targeting an exon of fIL1RAP is delivered via one or more lipid nanoparticles (LNPs), the LNPs comprising an LNP system described herein, e.g., and without limitation, any one of LNP systems LNP001 to LNP240.

[0457] In some embodiments, the CRISPR gene-editing system for the treatment of low back pain comprises one or more sgRNAs targeting TGFBR1. In some embodiments, the CRISPR gene-editing system for the treatment of low back pain comprises one or more sgRNAs targeting hTGFBR1. In some embodiments, the CRISPR gene-editing system for the treatment of low back pain comprises one or more sgRNAs targeting cTGFBR1. In some embodiments, the CRISPR gene-editing system for the treatment of low back pain comprises one or more sgRNAs targeting e TGFBR1. In some embodiments, the CRISPR gene-editing system for the treatment of low back pain comprises one or more sgRNAs targeting fTGFBR1. In some embodiments, the CRISPR gene-editing system for the treatment of low back pain comprising one or more sgRNAs targeting an exon of TGFBR1 is delivered via one or more lipid nanoparticles (LNPs), the LNPs comprising an LNP system described herein, e.g., and without limitation, any one of LNP systems LNP001 to LNP240.

[0458] In some embodiments, the CRISPR gene-editing system for the treatment of low back pain comprises one or more sgRNAs targeting exon 1 of hTGFBR1. In some embodiments, the CRISPR gene-editing system for the treatment of low back pain comprises one or more sgRNAs targeting exon 2 of hTGFBR1. In some embodiments, the CRISPR gene-editing system for the treatment of low back pain comprises one or more sgRNAs targeting exon 3 of hTGFBR1. In some embodiments, the CRISPR gene-editing system for the treatment of low back pain comprises one or more sgRNAs targeting exon 4 of hTGFBR1. In some embodiments, the CRISPR gene-editing system for the treatment of low back pain comprises one or more sgRNAs targeting exon 5 of hTGFBR1. In some embodiments, the CRISPR gene-editing system for the treatment of low back pain comprises one or more sgRNAs targeting exon 6 of hTGFBR1. In some embodiments, the CRISPR gene-editing system for the treatment of low back pain comprises one or more sgRNAs targeting exon 7 of hTGFBR1. In some embodiments, the CRISPR gene-editing system for the treatment of low back pain comprises one or more sgRNAs targeting exon 8 of hTGFBR1. In some embodiments, the CRISPR gene-editing system for the treatment of low back pain comprises one or more sgRNAs targeting exon 9 of hTGFBR1. In some embodiments, the CRISPR gene-editing system for the treatment of low back pain comprises one or more sgRNAs targeting exon 10 of hTGFBR1. In some embodiments, the CRISPR gene-editing system for the treatment of low back pain comprises one or more sgRNAs targeting exon 11 of hTGFBR1. In some embodiments, the CRISPR gene-editing system for the treatment of low back pain comprising one or more sgRNAs targeting an exon of hTGFBR1 is delivered via one or more lipid nanoparticles (LNPs), the LNPs comprising an LNP system described herein, e.g., and without limitation, any one of LNP systems LNP001 to LNP240.

[0459] In some embodiments, the CRISPR gene-editing system for the treatment of low back pain comprises one or more sgRNAs targeting exon 1 of cTGFBR1. In some embodiments, the CRISPR gene-editing system for the treatment of low back pain comprises one or more sgRNAs targeting exon 2 of cTGFBR1. In some embodiments, the CRISPR gene-editing system for the treatment of low back pain comprises one or more sgRNAs targeting exon 3 of cTGFBR1. In some embodiments, the CRISPR gene-editing system for the treatment of low back pain comprises one or more sgRNAs targeting exon 4 of cTGFBR1. In some embodiments, the CRISPR gene-editing system for the treatment of low back pain comprises one or more sgRNAs targeting exon 5 of cTGFBR1. In some embodiments, the CRISPR gene-editing system for the treatment of low back pain comprises one or more sgRNAs targeting exon 6 of cTGFBR1. In some embodiments, the CRISPR gene-editing system for the treatment of low back pain comprises one or more sgRNAs targeting exon 7 of cTGFBR1. In some embodiments, the CRISPR gene-editing system for the treatment of low back pain comprises one or more sgRNAs targeting exon 8 of cTGFBR1. In some embodiments, the CRISPR gene-editing system for the treatment of low back pain comprises one or more sgRNAs targeting exon 9 of cTGFBR1. In some embodiments, the CRISPR gene-editing system for the treatment of low back pain comprising one or more sgRNAs targeting an exon of cTGFBR1 is delivered via one or more lipid nanoparticles (LNPs), the LNPs comprising an LNP system described herein, e.g., and without limitation, any one of LNP systems LNP001 to LNP240.

[0460] In some embodiments, the CRISPR gene-editing system for the treatment of low back pain comprises one or more sgRNAs targeting exon 1 of eTGFBR1. In some embodiments, the CRISPR gene-editing system for the treatment of low back pain comprises one or more sgRNAs targeting exon 2 of eTGFBR1. In some embodiments, the CRISPR gene-editing system for the treatment of low back pain comprises one or more sgRNAs targeting exon 3 of eTGFBR1. In some embodiments, the CRISPR gene-editing system for the treatment of low back pain comprises one or more sgRNAs targeting exon 4 of eTGFBR1. In some embodiments, the CRISPR gene-editing system for the treatment of low back pain comprises one or more sgRNAs targeting exon 5 of eTGFBR1. In some embodiments, the CRISPR gene-editing system for the treatment of low back pain comprises one or more sgRNAs targeting exon 6 of eTGFBR1. In some embodiments, the CRISPR gene-editing system for the treatment of low back pain comprises one or more sgRNAs targeting exon 7 of eTGFBR1. In some embodiments, the CRISPR gene-editing system for the treatment of low back pain comprises one or more sgRNAs targeting exon 8 of eTGFBR1. In some embodiments, the CRISPR gene-editing system for the treatment of low back pain comprises one or more sgRNAs targeting exon 9 of eTGFBR1. In some embodiments, the CRISPR gene-editing system for the treatment of low back pain comprises one or more sgRNAs targeting exon 10 of eTGFBR1. In some embodiments, the CRISPR gene-editing system for the treatment of low back pain comprises one or more sgRNAs targeting exon 11 of eTGFBR1. In some embodiments, the CRISPR gene-editing system for the treatment of low back pain comprises one or more sgRNAs targeting exon 12 of eTGFBR1. In some embodiments, the CRISPR gene-editing system for the treatment of low back pain comprising one or more sgRNAs targeting an exon of eTGFBR1 is delivered via one or more lipid nanoparticles (LNPs), the LNPs comprising an LNP system described herein, e.g., and without limitation, any one of LNP systems LNP001 to LNP240.

[0461] In some embodiments, the CRISPR gene-editing system for the treatment of low back pain comprises one or more sgRNAs targeting exon 1 of fTGFBR1. In some embodiments, the CRISPR gene-editing system for the treatment of low back pain comprises one or more sgRNAs targeting exon 2 of fTGFBR1. In some embodiments, the CRISPR gene-editing system for the treatment of low back pain comprises one or more sgRNAs targeting exon 3 of fTGFBR1. In some embodiments, the CRISPR gene-editing system for the treatment of low back pain comprises one or more sgRNAs targeting exon 4 of fTGFBR1. In some embodiments, the CRISPR gene-editing system for the treatment of low back pain comprises one or more sgRNAs targeting exon 5 of fTGFBR1. In some embodiments, the CRISPR gene-editing system for the treatment of low back pain comprises one or more sgRNAs targeting exon 6 of fTGFBR1. In some embodiments, the CRISPR gene-editing system for the treatment of low back pain comprises one or more sgRNAs targeting exon 7 of fTGFBR1. In some embodiments, the CRISPR gene-editing system for the treatment of low back pain comprises one or more sgRNAs targeting exon 8 of fTGFBR1. In some embodiments, the CRISPR gene-editing system for the treatment of low back pain comprises one or more sgRNAs targeting exon 9 of fTGFBR1. In some embodiments, the CRISPR gene-editing system for the treatment of low back pain comprises one or more sgRNAs targeting exon 10 of fTGFBR1. In some embodiments, the CRISPR gene-editing system for the treatment of low back pain comprises one or more sgRNAs targeting exon 11 of fTGFBR1. In some embodiments, the CRISPR gene-editing system for the treatment of low back pain comprising one or more sgRNAs targeting an exon of fTGFBR1 is delivered via one or more lipid nanoparticles (LNPs), the LNPs comprising an LNP system described herein, e.g., and without limitation, any one of LNP systems LNP001 to LNP240.

[0462] In some embodiments, the CRISPR gene-editing system for the treatment of low back pain comprises one or more sgRNAs targeting TGFBR2. In some embodiments, the CRISPR gene-editing system for the treatment of low back pain comprises one or more sgRNAs targeting hTGFBR2. In some embodiments, the CRISPR gene-editing system for the treatment of low back pain comprises one or more sgRNAs targeting cTGFBR2. In some embodiments, the CRISPR gene-editing system for the treatment of low back pain comprises one or more sgRNAs targeting eTGFBR2. In some embodiments, the CRISPR gene-editing system for the treatment of low back pain comprises one or more sgRNAs targeting fTGFBR2. In some embodiments, the CRISPR gene-editing system for the treatment of low back pain comprising one or more sgRNAs targeting an exon of TGFBR2 is delivered via one or more lipid nanoparticles (LNPs), the LNPs comprising an LNP system described herein, e.g., and without limitation, any one of LNP systems LNP001 to LNP240.

[0463] In some embodiments, the CRISPR gene-editing system for the treatment of low back pain comprises one or more sgRNAs targeting exon 1 of hTGFBR2. In some embodiments, the CRISPR gene-editing system for the treatment of low back pain comprises one or more sgRNAs targeting exon 2 of hTGFBR2. In some embodiments, the CRISPR gene-editing system for the treatment of low back pain comprises one or more sgRNAs targeting exon 3 of hTGFBR2. In some embodiments, the CRISPR gene-editing system for the treatment of low back pain comprises one or more sgRNAs targeting exon 4 of hTGFBR2. In some embodiments, the CRISPR gene-editing system for the treatment of low back pain comprises one or more sgRNAs targeting exon 5 of hTGFBR2. In some embodiments, the CRISPR gene-editing system for the treatment of low back pain comprises one or more sgRNAs targeting exon 6 of hTGFBR2. In some embodiments, the CRISPR gene-editing system for the treatment of low back pain comprises one or more sgRNAs targeting exon 7 of hTGFBR2. In some embodiments, the CRISPR gene-editing system for the treatment of low back pain comprises one or more sgRNAs targeting exon 8 of hTGFBR2. In some embodiments, the CRISPR gene-editing system for the treatment of low back pain comprises one or more sgRNAs targeting exon 9 of hTGFBR2. In some embodiments, the CRISPR gene-editing system for the treatment of low back pain comprising one or more sgRNAs targeting an exon of hTGFBR2 is delivered via one or more lipid nanoparticles (LNPs), the LNPs comprising an LNP system described herein, e.g., and without limitation, any one of LNP systems LNP001 to LNP240.

[0464] In some embodiments, the CRISPR gene-editing system for the treatment of low back pain comprises one or more sgRNAs targeting exon 1 of cTGFBR2. In some embodiments, the CRISPR gene-editing system for the treatment of low back pain comprises one or more sgRNAs targeting exon 2 of cTGFBR2. In some embodiments, the CRISPR gene-editing system for the treatment of low back pain comprises one or more sgRNAs targeting exon 3 of cTGFBR2. In some embodiments, the CRISPR gene-editing system for the treatment of low back pain comprises one or more sgRNAs targeting exon 4 of cTGFBR2. In some embodiments, the CRISPR gene-editing system for the treatment of low back pain comprises one or more sgRNAs targeting exon 5 of cTGFBR2. In some embodiments, the CRISPR gene-editing system for the treatment of low back pain comprises one or more sgRNAs targeting exon 6 of cTGFBR2. In some embodiments, the CRISPR gene-editing system for the treatment of low back pain comprises one or more sgRNAs targeting exon 7 of cTGFBR2. In some embodiments, the CRISPR gene-editing system for the treatment of low back pain comprises one or more sgRNAs targeting exon 8 of cTGFBR2. In some embodiments, the CRISPR gene-editing system for the treatment of low back pain comprising one or more sgRNAs targeting an exon of cTGFBR2 is delivered via one or more lipid nanoparticles (LNPs), the LNPs comprising an LNP system described herein, e.g., and without limitation, any one of LNP systems LNP001 to LNP240.

[0465] In some embodiments, the CRISPR gene-editing system for the treatment of low back pain comprises one or more sgRNAs targeting exon 1 of eTGFBR2. In some embodiments, the CRISPR gene-editing system for the treatment of low back pain comprises one or more sgRNAs targeting exon 2 of eTGFBR2. In some embodiments, the CRISPR gene-editing system for the treatment of low back pain comprises one or more sgRNAs targeting exon 3 of eTGFBR2. In some embodiments, the CRISPR gene-editing system for the treatment of low back pain comprises one or more sgRNAs targeting exon 4 of eTGFBR2. In some embodiments, the CRISPR gene-editing system for the treatment of low back pain comprises one or more sgRNAs targeting exon 5 of eTGFBR2. In some embodiments, the CRISPR gene-editing system for the treatment of low back pain comprises one or more sgRNAs targeting exon 6 of eTGFBR2. In some embodiments, the CRISPR gene-editing system for the treatment of low back pain comprises one or more sgRNAs targeting exon 7 of eTGFBR2. In some embodiments, the CRISPR gene-editing system for the treatment of low back pain comprises one or more sgRNAs targeting exon 8 of eTGFBR2. In some embodiments, the CRISPR gene-editing system for the treatment of low back pain comprises one or more sgRNAs targeting exon 9 of eTGFBR2. In some embodiments, the CRISPR gene-editing system for the treatment of low back pain comprises one or more sgRNAs targeting exon 10 of eTGFBR2. In some embodiments, the CRISPR gene-editing system for the treatment of low back pain comprising one or more sgRNAs targeting an exon of cTGFBR2 is delivered via one or more lipid nanoparticles (LNPs), the LNPs comprising an LNP system described herein, e.g., and without limitation, any one of LNP systems LNP001 to LNP240.

[0466] In some embodiments, the CRISPR gene-editing system for the treatment of low back pain comprises one or more sgRNAs targeting exon 1 of fTGFBR2. In some embodiments, the CRISPR gene-editing system for the treatment of low back pain comprises one or more sgRNAs targeting exon 2 of fTGFBR2. In some embodiments, the CRISPR gene-editing system for the treatment of low back pain comprises one or more sgRNAs targeting exon 3 of fTGFBR2. In some embodiments, the CRISPR gene-editing system for the treatment of low back pain comprises one or more sgRNAs targeting exon 4 of fTGFBR2. In some embodiments, the CRISPR gene-editing system for the treatment of low back pain comprises one or more sgRNAs targeting exon 5 of fTGFBR2. In some embodiments, the CRISPR gene-editing system for the treatment of low back pain comprises one or more sgRNAs targeting exon 6 of fTGFBR2. In some embodiments, the CRISPR gene-editing system for the treatment of low back pain comprises one or more sgRNAs targeting exon 7 of fTGFBR2. In some embodiments, the CRISPR gene-editing system for the treatment of low back pain comprises one or more sgRNAs targeting exon 8 of fTGFBR2. In some embodiments, the CRISPR gene-editing system for the treatment of low back pain comprising one or more sgRNAs targeting an exon of fTGFBR2 is delivered via one or more lipid nanoparticles (LNPs), the LNPs comprising an LNP system described herein, e.g., and without limitation, any one of LNP systems LNP001 to LNP240.

[0467] In some embodiments, the CRISPR gene-editing system for the treatment of low back pain comprises one or more sgRNAs targeting IL6R. In some embodiments, the CRISPR gene-editing system for the treatment of low back pain comprises one or more sgRNAs targeting hIL6R. In some embodiments, the CRISPR gene-editing system for the treatment of low back pain comprises one or more sgRNAs targeting cIL6R. In some embodiments, the CRISPR gene-editing system for the treatment of low back pain comprises one or more sgRNAs targeting eIL6R. In some embodiments, the CRISPR gene-editing system for the treatment of low back pain comprises one or more sgRNAs targeting fIL6R. In some embodiments, the CRISPR gene-editing system for the treatment of low back pain comprising one or more sgRNAs targeting an exon of IL6R is delivered via one or more lipid nanoparticles (LNPs), the LNPs comprising an LNP system described herein, e.g., and without limitation, any one of LNP systems LNP001 to LNP240.

[0468] In some embodiments, the CRISPR gene-editing system for the treatment of low back pain comprises one or more sgRNAs targeting exon 1 of hIL6R. In some embodiments, the CRISPR gene-editing system for the treatment of low back pain comprises one or more sgRNAs targeting exon 2 of hIL6R. In some embodiments, the CRISPR gene-editing system for the treatment of low back pain comprises one or more sgRNAs targeting exon 3 of hIL6R. In some embodiments, the CRISPR gene-editing system for the treatment of low back pain comprises one or more sgRNAs targeting exon 4 of hIL6R. In some embodiments, the CRISPR gene-editing system for the treatment of low back pain comprises one or more sgRNAs targeting exon 5 of hIL6R. In some embodiments, the CRISPR gene-editing system for the treatment of low back pain comprises one or more sgRNAs targeting exon 6 of hIL6R. In some embodiments, the CRISPR gene-editing system for the treatment of low back pain comprises one or more sgRNAs targeting exon 7 of hIL6R. In some embodiments, the CRISPR gene-editing system for the treatment of low back pain comprises one or more sgRNAs targeting exon 8 of hIL6R. In some embodiments, the CRISPR gene-editing system for the treatment of low back pain comprises one or more sgRNAs targeting exon 9 of hIL6R. In some embodiments, the CRISPR gene-editing system for the treatment of low back pain comprises one or more sgRNAs targeting exon 10 of hIL6R. In some embodiments, the CRISPR gene-editing system for the treatment of low back pain comprises one or more sgRNAs targeting exon 11 of hIL6R In some embodiments, the CRISPR gene-editing system for the treatment of low back pain comprises one or more sgRNAs targeting exon 12 of hIL6R. In some embodiments, the CRISPR gene-editing system for the treatment of low back pain comprises one or more sgRNAs targeting exon 13 of hIL6R. In some embodiments, the CRISPR gene-editing system for the treatment of low back pain comprises one or more sgRNAs targeting exon 14 of hIL6R. In some embodiments, the CRISPR gene-editing system for the treatment of low back pain comprises one or more sgRNAs targeting exon 15 of hIL6R. In some embodiments, the CRISPR gene-editing system for the treatment of low back pain comprising one or more sgRNAs targeting an exon of hIL6R is delivered via one or more lipid nanoparticles (LNPs), the LNPs comprising an LNP system described herein, e.g., and without limitation, any one of LNP systems LNP001 to LNP240.

[0469] In some embodiments, the CRISPR gene-editing system for the treatment of low back pain comprises one or more sgRNAs targeting exon 1 of cIL6R. In some embodiments, the CRISPR gene-editing system for the treatment of low back pain comprises one or more sgRNAs targeting exon 2 of cIL6R. In some embodiments, the CRISPR gene-editing system for the treatment of low back pain comprises one or more sgRNAs targeting exon 3 of cIL6R. In some embodiments, the CRISPR gene-editing system for the treatment of low back pain comprises one or more sgRNAs targeting exon 4 of cIL6R. In some embodiments, the CRISPR gene-editing system for the treatment of low back pain comprises one or more sgRNAs targeting exon 5 of cIL6R. In some embodiments, the CRISPR gene-editing system for the treatment of low back pain comprises one or more sgRNAs targeting exon 6 of cIL6R. In some embodiments, the CRISPR gene-editing system for the treatment of low back pain comprises one or more sgRNAs targeting exon 7 of cIL6R. In some embodiments, the CRISPR gene-editing system for the treatment of low back pain comprises one or more sgRNAs targeting exon 8 of cIL6R. In some embodiments, the CRISPR gene-editing system for the treatment of low back pain comprises one or more sgRNAs targeting exon 9 of cIL6R. In some embodiments, the CRISPR gene-editing system for the treatment of low back pain comprises one or more sgRNAs targeting exon 10 of cIL6R. In some embodiments, the CRISPR gene-editing system for the treatment of low back pain comprises one or more sgRNAs targeting exon 11 of cIL6R. In some embodiments, the CRISPR gene-editing system for the treatment of low back pain comprises one or more sgRNAs targeting exon 12 of cIL6R. In some embodiments, the CRISPR gene-editing system for the treatment of low back pain comprises one or more sgRNAs targeting exon 13 of cIL6R. In some embodiments, the CRISPR gene-editing system for the treatment of low back pain comprising one or more sgRNAs targeting an exon of cIL6R is delivered via one or more lipid nanoparticles (LNPs), the LNPs comprising an LNP system described herein, e.g., and without limitation, any one of LNP systems LNP001 to LNP240.

[0470] In some embodiments, the CRISPR gene-editing system for the treatment of low back pain comprises one or more sgRNAs targeting exon 1 of eIL6R. In some embodiments, the CRISPR gene-editing system for the treatment of low back pain comprises one or more sgRNAs targeting exon 2 of eIL6R. In some embodiments, the CRISPR gene-editing system for the treatment of low back pain comprises one or more sgRNAs targeting exon 3 of eIL6R. In some embodiments, the CRISPR gene-editing system for the treatment of low back pain comprises one or more sgRNAs targeting exon 4 of eIL6R. In some embodiments, the CRISPR gene-editing system for the treatment of low back pain comprises one or more sgRNAs targeting exon 5 of eIL6R. In some embodiments, the CRISPR gene-editing system for the treatment of low back pain comprises one or more sgRNAs targeting exon 6 of eIL6R. In some embodiments, the CRISPR gene-editing system for the treatment of low back pain comprises one or more sgRNAs targeting exon 7 of eIL6R. In some embodiments, the CRISPR gene-editing system for the treatment of low back pain comprises one or more sgRNAs targeting exon 8 of eIL6R. In some embodiments, the CRISPR gene-editing system for the treatment of low back pain comprises one or more sgRNAs targeting exon 9 of eIL6R. In some embodiments, the CRISPR gene-editing system for the treatment of low back pain comprises one or more sgRNAs targeting exon 10 of eIL6R. In some embodiments, the CRISPR gene-editing system for the treatment of low back pain comprises one or more sgRNAs targeting exon 11 of eIL6R. In some embodiments, the CRISPR gene-editing system for the treatment of low back pain comprising one or more sgRNAs targeting an exon of eIL6R is delivered via one or more lipid nanoparticles (LNPs), the LNPs comprising an LNP system described herein, e.g., and without limitation, any one of LNP systems LNP001 to LNP240.

[0471] In some embodiments, the CRISPR gene-editing system for the treatment of low back pain comprises one or more sgRNAs targeting exon 1 of fIL6R. In some embodiments, the CRISPR gene-editing system for the treatment of low back pain comprises one or more sgRNAs targeting exon 2 of fIL6R. In some embodiments, the CRISPR gene-editing system for the treatment of low back pain comprises one or more sgRNAs targeting exon 3 of fIL6R. In some embodiments, the CRISPR gene-editing system for the treatment of low back pain comprises one or more sgRNAs targeting exon 4 of fIL6R. In some embodiments, the CRISPR gene-editing system for the treatment of low back pain comprises one or more sgRNAs targeting exon 5 of fIL6R. In some embodiments, the CRISPR gene-editing system for the treatment of low back pain comprises one or more sgRNAs targeting exon 6 of fIL6R. In some embodiments, the CRISPR gene-editing system for the treatment of low back pain comprises one or more sgRNAs targeting exon 7 of fIL6R. In some embodiments, the CRISPR gene-editing system for the treatment of low back pain comprises one or more sgRNAs targeting exon 8 of fIL6R. In some embodiments, the CRISPR gene-editing system for the treatment of low back pain comprises one or more sgRNAs targeting exon 9 of fIL6R. In some embodiments, the CRISPR gene-editing system for the treatment of low back pain comprises one or more sgRNAs targeting exon 10 of fIL6R. In some embodiments, the CRISPR gene-editing system for the treatment of low back pain comprising one or more sgRNAs targeting an exon of fIL6R is delivered via one or more lipid nanoparticles (LNPs), the LNPs comprising an LNP system described herein, e.g., and without limitation, any one of LNP systems LNP001 to LNP240.

[0472] In some embodiments, the CRISPR gene-editing system for the treatment of low back pain comprises one or more sgRNAs targeting IL6ST. In some embodiments, the CRISPR gene-editing system for the treatment of low back pain comprises one or more sgRNAs targeting hIL6ST. In some embodiments, the CRISPR gene-editing system for the treatment of low back pain comprises one or more sgRNAs targeting cIL6ST. In some embodiments, the CRISPR gene-editing system for the treatment of low back pain comprises one or more sgRNAs targeting eIL6ST. In some embodiments, the CRISPR gene-editing system for the treatment of low back pain comprises one or more sgRNAs targeting fIL6ST. In some embodiments, the CRISPR gene-editing system for the treatment of low back pain comprising one or more sgRNAs targeting an exon of IL6ST is delivered via one or more lipid nanoparticles (LNPs), the LNPs comprising an LNP system described herein, e.g., and without limitation, any one of LNP systems LNP001 to LNP240.

[0473] In some embodiments, the CRISPR gene-editing system for the treatment of low back pain comprises one or more sgRNAs targeting exon 1 of hIL6ST. In some embodiments, the CRISPR gene-editing system for the treatment of low back pain comprises one or more sgRNAs targeting exon 2 of hIL6ST. In some embodiments, the CRISPR gene-editing system for the treatment of low back pain comprises one or more sgRNAs targeting exon 3 of hIL6ST. In some embodiments, the CRISPR gene-editing system for the treatment of low back pain comprises one or more sgRNAs targeting exon 4 of hIL6ST. In some embodiments, the CRISPR gene-editing system for the treatment of low back pain comprises one or more sgRNAs targeting exon 5 of hIL6ST. In some embodiments, the CRISPR gene-editing system for the treatment of low back pain comprises one or more sgRNAs targeting exon 6 of hIL6ST. In some embodiments, the CRISPR gene-editing system for the treatment of low back pain comprises one or more sgRNAs targeting exon 7 of hIL6ST. In some embodiments, the CRISPR gene-editing system for the treatment of low back pain comprises one or more sgRNAs targeting exon 8 of hIL6ST. In some embodiments, the CRISPR gene-editing system for the treatment of low back pain comprises one or more sgRNAs targeting exon 9 of hIL6ST. In some embodiments, the CRISPR gene-editing system for the treatment of low back pain comprises one or more sgRNAs targeting exon 10 of hIL6ST. In some embodiments, the CRISPR gene-editing system for the treatment of low back pain comprises one or more sgRNAs targeting exon 11 of hIL6ST. In some embodiments, the CRISPR gene-editing system for the treatment of low back pain comprises one or more sgRNAs targeting exon 12 of hIL6ST. In some embodiments, the CRISPR gene-editing system for the treatment of low back pain comprises one or more sgRNAs targeting exon 13 of hIL6ST. In some embodiments, the CRISPR gene-editing system for the treatment of low back pain comprises one or more sgRNAs targeting exon 14 of hIL6ST. In some embodiments, the CRISPR gene-editing system for the treatment of low back pain comprises one or more sgRNAs targeting exon 15 of hIL6ST. In some embodiments, the CRISPR gene-editing system for the treatment of low back pain comprises one or more sgRNAs targeting exon 16 of hIL6ST. In some embodiments, the CRISPR gene-editing system for the treatment of low back pain comprises one or more sgRNAs targeting exon 17 of hIL6ST. In some embodiments, the CRISPR gene-editing system for the treatment of low back pain comprises one or more sgRNAs targeting exon 18 of hIL6ST. In some embodiments, the CRISPR gene-editing system for the treatment of low back pain comprises one or more sgRNAs targeting exon 19 of hIL6ST. In some embodiments, the CRISPR gene-editing system for the treatment of low back pain comprising one or more sgRNAs targeting an exon of hIL6ST is delivered via one or more lipid nanoparticles (LNPs), the LNPs comprising an LNP system described herein, e.g., and without limitation, any one of LNP systems LNP001 to LNP240.

[0474] In some embodiments, the CRISPR gene-editing system for the treatment of low back pain comprises one or more sgRNAs targeting exon 1 of cIL6ST. In some embodiments, the CRISPR gene-editing system for the treatment of low back pain comprises one or more sgRNAs targeting exon 2 of cIL6ST. In some embodiments, the CRISPR gene-editing system for the treatment of low back pain comprises one or more sgRNAs targeting exon 3 of cIL6ST. In some embodiments, the CRISPR gene-editing system for the treatment of low back pain comprises one or more sgRNAs targeting exon 4 of cIL6ST. In some embodiments, the CRISPR gene-editing system for the treatment of low back pain comprises one or more sgRNAs targeting exon 5 of cIL6ST. In some embodiments, the CRISPR gene-editing system for the treatment of low back pain comprises one or more sgRNAs targeting exon 6 of cIL6ST. In some embodiments, the CRISPR gene-editing system for the treatment of low back pain comprises one or more sgRNAs targeting exon 7 of cIL6ST. In some embodiments, the CRISPR gene-editing system for the treatment of low back pain comprises one or more sgRNAs targeting exon 8 of cIL6ST. In some embodiments, the CRISPR gene-editing system for the treatment of low back pain comprises one or more sgRNAs targeting exon 9 of cIL6ST. In some embodiments, the CRISPR gene-editing system for the treatment of low back pain comprises one or more sgRNAs targeting exon 10 of cIL6ST. In some embodiments, the CRISPR gene-editing system for the treatment of low back pain comprises one or more sgRNAs targeting exon 11 of cIL6ST In some embodiments, the CRISPR gene-editing system for the treatment of low back pain comprises one or more sgRNAs targeting exon 12 of cIL6ST. In some embodiments, the CRISPR gene-editing system for the treatment of low back pain comprises one or more sgRNAs targeting exon 13 of cIL6ST. In some embodiments, the CRISPR gene-editing system for the treatment of low back pain comprises one or more sgRNAs targeting exon 14 of cIL6ST. In some embodiments, the CRISPR gene-editing system for the treatment of low back pain comprises one or more sgRNAs targeting exon 15 of cIL6ST. In some embodiments, the CRISPR gene-editing system for the treatment of low back pain comprises one or more sgRNAs targeting exon 16 of cIL6ST. In some embodiments, the CRISPR gene-editing system for the treatment of low back pain comprises one or more sgRNAs targeting exon 17 of cIL6ST. In some embodiments, the CRISPR gene-editing system for the treatment of low back pain comprises one or more sgRNAs targeting exon 18 of cIL6ST. In some embodiments, the CRISPR gene-editing system for the treatment of low back pain comprising one or more sgRNAs targeting an exon of cIL6ST is delivered via one or more lipid nanoparticles (LNPs), the LNPs comprising an LNP system described herein, e.g., and without limitation, any one of LNP systems LNP001 to LNP240.

[0475] In some embodiments, the CRISPR gene-editing system for the treatment of low back pain comprises one or more sgRNAs targeting exon 1 of eIL6ST. In some embodiments, the CRISPR gene-editing system for the treatment of low back pain comprises one or more sgRNAs targeting exon 2 of eIL6ST. In some embodiments, the CRISPR gene-editing system for the treatment of low back pain comprises one or more sgRNAs targeting exon 3 of eIL6ST. In some embodiments, the CRISPR gene-editing system for the treatment of low back pain comprises one or more sgRNAs targeting exon 4 of eIL6ST. In some embodiments, the CRISPR gene-editing system for the treatment of low back pain comprises one or more sgRNAs targeting exon 5 of eIL6ST. In some embodiments, the CRISPR gene-editing system for the treatment of low back pain comprises one or more sgRNAs targeting exon 6 of eIL6ST. In some embodiments, the CRISPR gene-editing system for the treatment of low back pain comprises one or more sgRNAs targeting exon 7 of eIL6ST. In some embodiments, the CRISPR gene-editing system for the treatment of low back pain comprises one or more sgRNAs targeting exon 8 of eIL6ST. In some embodiments, the CRISPR gene-editing system for the treatment of low back pain comprises one or more sgRNAs targeting exon 9 of eIL6ST. In some embodiments, the CRISPR gene-editing system for the treatment of low back pain comprises one or more sgRNAs targeting exon 10 of eIL6ST. In some embodiments, the CRISPR gene-editing system for the treatment of low back pain comprises one or more sgRNAs targeting exon 11 of eIL6ST In some embodiments, the CRISPR gene-editing system for the treatment of low back pain comprises one or more sgRNAs targeting exon 12 of eIL6ST. In some embodiments, the CRISPR gene-editing system for the treatment of low back pain comprises one or more sgRNAs targeting exon 13 of eIL6ST. In some embodiments, the CRISPR gene-editing system for the treatment of low back pain comprises one or more sgRNAs targeting exon 14 of eIL6ST. In some embodiments, the CRISPR gene-editing system for the treatment of low back pain comprises one or more sgRNAs targeting exon 15 of eIL6ST. In some embodiments, the CRISPR gene-editing system for the treatment of low back pain comprises one or more sgRNAs targeting exon 16 of eIL6ST. In some embodiments, the CRISPR gene-editing system for the treatment of low back pain comprises one or more sgRNAs targeting exon 17 of eIL6ST. In some embodiments, the CRISPR gene-editing system for the treatment of low back pain comprises one or more sgRNAs targeting exon 18 of eIL6ST. In some embodiments, the CRISPR gene-editing system for the treatment of low back pain comprising one or more sgRNAs targeting an exon of eIL6ST is delivered via one or more lipid nanoparticles (LNPs), the LNPs comprising an LNP system described herein, e.g., and without limitation, any one of LNP systems LNP001 to LNP240.

[0476] In some embodiments, the CRISPR gene-editing system for the treatment of low back pain comprises one or more sgRNAs targeting exon 1 of fIL6ST. In some embodiments, the CRISPR gene-editing system for the treatment of low back pain comprises one or more sgRNAs targeting exon 2 of fIL6ST. In some embodiments, the CRISPR gene-editing system for the treatment of low back pain comprises one or more sgRNAs targeting exon 3 of fIL6ST. In some embodiments, the CRISPR gene-editing system for the treatment of low back pain comprises one or more sgRNAs targeting exon 4 of fIL6ST. In some embodiments, the CRISPR gene-editing system for the treatment of low back pain comprises one or more sgRNAs targeting exon 5 of fIL6ST. In some embodiments, the CRISPR gene-editing system for the treatment of low back pain comprises one or more sgRNAs targeting exon 6 of fIL6ST. In some embodiments, the CRISPR gene-editing system for the treatment of low back pain comprises one or more sgRNAs targeting exon 7 of fIL6ST. In some embodiments, the CRISPR gene-editing system for the treatment of low back pain comprises one or more sgRNAs targeting exon 8 of fIL6ST. In some embodiments, the CRISPR gene-editing system for the treatment of low back pain comprises one or more sgRNAs targeting exon 9 of fIL6ST. In some embodiments, the CRISPR gene-editing system for the treatment of low back pain comprises one or more sgRNAs targeting exon 10 of fIL6ST. In some embodiments, the CRISPR gene-editing system for the treatment of low back pain comprises one or more sgRNAs targeting exon 11 of fIL6ST In some embodiments, the CRISPR gene-editing system for the treatment of low back pain comprises one or more sgRNAs targeting exon 12 of fIL6ST. In some embodiments, the CRISPR gene-editing system for the treatment of low back pain comprises one or more sgRNAs targeting exon 13 of fIL6ST. In some embodiments, the CRISPR gene-editing system for the treatment of low back pain comprises one or more sgRNAs targeting exon 14 of fIL6ST. In some embodiments, the CRISPR gene-editing system for the treatment of low back pain comprises one or more sgRNAs targeting exon 15 of fIL6ST. In some embodiments, the CRISPR gene-editing system for the treatment of low back pain comprises one or more sgRNAs targeting exon 16 of fIL6ST. In some embodiments, the CRISPR gene-editing system for the treatment of low back pain comprises one or more sgRNAs targeting exon 17 of fIL6ST. In some embodiments, the CRISPR gene-editing system for the treatment of low back pain comprises one or more sgRNAs targeting exon 18 of fIL6ST. In some embodiments, the CRISPR gene-editing system for the treatment of low back pain comprises one or more sgRNAs targeting exon 19 of fIL6ST. In some embodiments, the CRISPR gene-editing system for the treatment of low back pain comprises one or more sgRNAs targeting exon 20 of fIL6ST. In some embodiments, the CRISPR gene-editing system for the treatment of low back pain comprising one or more sgRNAs targeting an exon of fIL6ST is delivered via one or more lipid nanoparticles (LNPs), the LNPs comprising an LNP system described herein, e.g., and without limitation, any one of LNP systems LNP001 to LNP240.

[0477] In some embodiments, the CRISPR gene-editing system for the treatment of low back pain comprises one or more sgRNAs targeting TNFRSF1A. In some embodiments, the CRISPR gene-editing system for the treatment of low back pain comprises one or more sgRNAs targeting hTNFRSF1A. In some embodiments, the CRISPR gene-editing system for the treatment of low back pain comprises one or more sgRNAs targeting cTNFRSF1A. In some embodiments, the CRISPR gene-editing system for the treatment of low back pain comprises one or more sgRNAs targeting eTNFRSF1A. In some embodiments, the CRISPR gene-editing system for the treatment of low back pain comprises one or more sgRNAs targeting fTNFRSF1A. In some embodiments, the CRISPR gene-editing system for the treatment of low back pain comprising one or more sgRNAs targeting an exon of TNFRSF1A is delivered via one or more lipid nanoparticles (LNPs), the LNPs comprising an LNP system described herein, e.g., and without limitation, any one of LNP systems LNP001 to LNP240.

[0478] In some embodiments, the CRISPR gene-editing system for the treatment of low back pain comprises one or more sgRNAs targeting exon 1 of hTNFRSF1A. In some embodiments, the CRISPR gene-editing system for the treatment of low back pain comprises one or more sgRNAs targeting exon 2 of hTNFRSF1A. In some embodiments, the CRISPR gene-editing system for the treatment of low back pain comprises one or more sgRNAs targeting exon 3 of hTNFRSF1A. In some embodiments, the CRISPR gene-editing system for the treatment of low back pain comprises one or more sgRNAs targeting exon 4 of hTNFRSF1A. In some embodiments, the CRISPR gene-editing system for the treatment of low back pain comprises one or more sgRNAs targeting exon 5 of hTNFRSF1A. In some embodiments, the CRISPR gene-editing system for the treatment of low back pain comprises one or more sgRNAs targeting exon 6 of hTNFRSF1A. In some embodiments, the CRISPR gene-editing system for the treatment of low back pain comprises one or more sgRNAs targeting exon 7 of hTNFRSF1A. In some embodiments, the CRISPR gene-editing system for the treatment of low back pain comprises one or more sgRNAs targeting exon 8 of hTNFRSF1A. In some embodiments, the CRISPR gene-editing system for the treatment of low back pain comprises one or more sgRNAs targeting exon 9 of hTNFRSF1A. In some embodiments, the CRISPR gene-editing system for the treatment of low back pain comprises one or more sgRNAs targeting exon 10 of hTNFRSF1A. In some embodiments, the CRISPR gene-editing system for the treatment of low back pain comprises one or more sgRNAs targeting exon 11 of hTNFRSF1A. In some embodiments, the CRISPR gene-editing system for the treatment of low back pain comprising one or more sgRNAs targeting an exon of hTNFRSF1A is delivered via one or more lipid nanoparticles (LNPs), the LNPs comprising an LNP system described herein, e.g., and without limitation, any one of LNP systems LNP001 to LNP240.

[0479] In some embodiments, the CRISPR gene-editing system for the treatment of low back pain comprises one or more sgRNAs targeting exon 1 of cTNFRSF1A. In some embodiments, the CRISPR gene-editing system for the treatment of low back pain comprises one or more sgRNAs targeting exon 2 of cTNFRSF1A. In some embodiments, the CRISPR gene-editing system for the treatment of low back pain comprises one or more sgRNAs targeting exon 3 of cTNFRSF1A. In some embodiments, the CRISPR gene-editing system for the treatment of low back pain comprises one or more sgRNAs targeting exon 4 of cTNFRSF1A. In some embodiments, the CRISPR gene-editing system for the treatment of low back pain comprises one or more sgRNAs targeting exon 5 of cTNFRSF1A. In some embodiments, the CRISPR gene-editing system for the treatment of low back pain comprises one or more sgRNAs targeting exon 6 of cTNFRSF1A. In some embodiments, the CRISPR gene-editing system for the treatment of low back pain comprises one or more sgRNAs targeting exon 7 of cTNFRSF1A. In some embodiments, the CRISPR gene-editing system for the treatment of low back pain comprises one or more sgRNAs targeting exon 8 of cTNFRSF1A. In some embodiments, the CRISPR gene-editing system for the treatment of low back pain comprises one or more sgRNAs targeting exon 9 of cTNFRSF1A. In some embodiments, the CRISPR gene-editing system for the treatment of low back pain comprises one or more sgRNAs targeting exon 10 of cTNFRSF1A. In some embodiments, the CRISPR gene-editing system for the treatment of low back pain comprises one or more sgRNAs targeting exon 11 of cTNFRSF1A. In some embodiments, the CRISPR gene-editing system for the treatment of low back pain comprising one or more sgRNAs targeting an exon of cTNFRSF1A is delivered via one or more lipid nanoparticles (LNPs), the LNPs comprising an LNP system described herein, e.g., and without limitation, any one of LNP systems LNP001 to LNP240.

[0480] In some embodiments, the CRISPR gene-editing system for the treatment of low back pain comprises one or more sgRNAs targeting exon 1 of eTNFRSF1A. In some embodiments, the CRISPR gene-editing system for the treatment of low back pain comprises one or more sgRNAs targeting exon 2 of eTNFRSF1A. In some embodiments, the CRISPR gene-editing system for the treatment of low back pain comprises one or more sgRNAs targeting exon 3 of eTNFRSF1A. In some embodiments, the CRISPR gene-editing system for the treatment of low back pain comprises one or more sgRNAs targeting exon 4 of eTNFRSF1A. In some embodiments, the CRISPR gene-editing system for the treatment of low back pain comprises one or more sgRNAs targeting exon 5 of eTNFRSF1A. In some embodiments, the CRISPR gene-editing system for the treatment of low back pain comprises one or more sgRNAs targeting exon 6 of eTNFRSF1A. In some embodiments, the CRISPR gene-editing system for the treatment of low back pain comprises one or more sgRNAs targeting exon 7 of eTNFRSF1A. In some embodiments, the CRISPR gene-editing system for the treatment of low back pain comprises one or more sgRNAs targeting exon 8 of eTNFRSF1A. In some embodiments, the CRISPR gene-editing system for the treatment of low back pain comprises one or more sgRNAs targeting exon 9 of eTNFRSF1A. In some embodiments, the CRISPR gene-editing system for the treatment of low back pain comprises one or more sgRNAs targeting exon 10 of eTNFRSF1A. In some embodiments, the CRISPR gene-editing system for the treatment of low back pain comprising one or more sgRNAs targeting an exon of eTNFRSF1A is delivered via one or more lipid nanoparticles (LNPs), the LNPs comprising an LNP system described herein, e.g., and without limitation, any one of LNP systems LNP001 to LNP240.

[0481] In some embodiments, the CRISPR gene-editing system for the treatment of low back pain comprises one or more sgRNAs targeting exon 1 of fTNFRSF1A. In some embodiments, the CRISPR gene-editing system for the treatment of low back pain comprises one or more sgRNAs targeting exon 2 of fTNFRSF1A. In some embodiments, the CRISPR gene-editing system for the treatment of low back pain comprises one or more sgRNAs targeting exon 3 of fTNFRSF1A. In some embodiments, the CRISPR gene-editing system for the treatment of low back pain comprises one or more sgRNAs targeting exon 4 of fTNFRSF1A. In some embodiments, the CRISPR gene-editing system for the treatment of low back pain comprises one or more sgRNAs targeting exon 5 of fTNFRSF1A. In some embodiments, the CRISPR gene-editing system for the treatment of low back pain comprises one or more sgRNAs targeting exon 6 of fTNFRSF1A. In some embodiments, the CRISPR gene-editing system for the treatment of low back pain comprises one or more sgRNAs targeting exon 7 of fTNFRSF1A. In some embodiments, the CRISPR gene-editing system for the treatment of low back pain comprises one or more sgRNAs targeting exon 8 of fTNFRSF1A. In some embodiments, the CRISPR gene-editing system for the treatment of low back pain comprises one or more sgRNAs targeting exon 9 of fTNFRSF1A. In some embodiments, the CRISPR gene-editing system for the treatment of low back pain comprises one or more sgRNAs targeting exon 10 of fTNFRSF1A. In some embodiments, the CRISPR gene-editing system for the treatment of low back pain comprising one or more sgRNAs targeting an exon of fTNFRSF1A is delivered via one or more lipid nanoparticles (LNPs), the LNPs comprising an LNP system described herein, e.g., and without limitation, any one of LNP systems LNP001 to LNP240.

[0482] In some embodiments, the CRISPR gene-editing system for the treatment of low back pain comprises one or more sgRNAs targeting TNFRSF1B. In some embodiments, the CRISPR gene-editing system for the treatment of low back pain comprises one or more sgRNAs targeting hTNFRSF1B. In some embodiments, the CRISPR gene-editing system for the treatment of low back pain comprises one or more sgRNAs targeting cTNFRSF1B. In some embodiments, the CRISPR gene-editing system for the treatment of low back pain comprises one or more sgRNAs targeting eTNFRSF1B. In some embodiments, the CRISPR gene-editing system for the treatment of low back pain comprises one or more sgRNAs targeting fTNFRSF1B. In some embodiments, the CRISPR gene-editing system for the treatment of low back pain comprising one or more sgRNAs targeting an exon of TNFRSF1B is delivered via one or more lipid nanoparticles (LNPs), the LNPs comprising an LNP system described herein, e.g., and without limitation, any one of LNP systems LNP001 to LNP240.

[0483] In some embodiments, the CRISPR gene-editing system for the treatment of low back pain comprises one or more sgRNAs targeting exon 1 of hTNFRSF1B. In some embodiments, the CRISPR gene-editing system for the treatment of low back pain comprises one or more sgRNAs targeting exon 2 of hTNFRSF1B. In some embodiments, the CRISPR gene-editing system for the treatment of low back pain comprises one or more sgRNAs targeting exon 3 of hTNFRSF1B. In some embodiments, the CRISPR gene-editing system for the treatment of low back pain comprises one or more sgRNAs targeting exon 4 of hTNFRSF1B. In some embodiments, the CRISPR gene-editing system for the treatment of low back pain comprises one or more sgRNAs targeting exon 5 of hTNFRSF1B. In some embodiments, the CRISPR gene-editing system for the treatment of low back pain comprises one or more sgRNAs targeting exon 6 of hTNFRSF1B. In some embodiments, the CRISPR gene-editing system for the treatment of low back pain comprises one or more sgRNAs targeting exon 7 of hTNFRSF1B. In some embodiments, the CRISPR gene-editing system for the treatment of low back pain comprises one or more sgRNAs targeting exon 8 of hTNFRSF1B. In some embodiments, the CRISPR gene-editing system for the treatment of low back pain comprises one or more sgRNAs targeting exon 9 of hTNFRSF1B. In some embodiments, the CRISPR gene-editing system for the treatment of low back pain comprises one or more sgRNAs targeting exon 10 of hTNFRSF1B. In some embodiments, the CRISPR gene-editing system for the treatment of low back pain comprises one or more sgRNAs targeting exon 11 of hTNFRSF1B In some embodiments, the CRISPR gene-editing system for the treatment of low back pain comprises one or more sgRNAs targeting exon 12 of hTNFRSF1B. In some embodiments, the CRISPR gene-editing system for the treatment of low back pain comprises one or more sgRNAs targeting exon 13 of hTNFRSF1B. In some embodiments, the CRISPR gene-editing system for the treatment of low back pain comprising one or more sgRNAs targeting an exon of hTNFRSF1B is delivered via one or more lipid nanoparticles (LNPs), the LNPs comprising an LNP system described herein, e.g., and without limitation, any one of LNP systems LNP001 to LNP240.

[0484] In some embodiments, the CRISPR gene-editing system for the treatment of low back pain comprises one or more sgRNAs targeting exon 1 of cTNFRSF1B. In some embodiments, the CRISPR gene-editing system for the treatment of low back pain comprises one or more sgRNAs targeting exon 2 of cTNFRSF1B. In some embodiments, the CRISPR gene-editing system for the treatment of low back pain comprises one or more sgRNAs targeting exon 3 of cTNFRSF1B. In some embodiments, the CRISPR gene-editing system for the treatment of low back pain comprises one or more sgRNAs targeting exon 4 of cTNFRSF1B. In some embodiments, the CRISPR gene-editing system for the treatment of low back pain comprises one or more sgRNAs targeting exon 5 of cTNFRSF1B. In some embodiments, the CRISPR gene-editing system for the treatment of low back pain comprises one or more sgRNAs targeting exon 6 of cTNFRSF1B. In some embodiments, the CRISPR gene-editing system for the treatment of low back pain comprises one or more sgRNAs targeting exon 7 of cTNFRSF1B. In some embodiments, the CRISPR gene-editing system for the treatment of low back pain comprises one or more sgRNAs targeting exon 8 of cTNFRSF1B. In some embodiments, the CRISPR gene-editing system for the treatment of low back pain comprises one or more sgRNAs targeting exon 9 of cTNFRSF1B. In some embodiments, the CRISPR gene-editing system for the treatment of low back pain comprises one or more sgRNAs targeting exon 10 of cTNFRSF1B. In some embodiments, the CRISPR gene-editing system for the treatment of low back pain comprises one or more sgRNAs targeting exon 11 of cTNFRSF1B. In some embodiments, the CRISPR gene-editing system for the treatment of low back pain comprising one or more sgRNAs targeting an exon of cTNFRSF1B is delivered via one or more lipid nanoparticles (LNPs), the LNPs comprising an LNP system described herein, e.g., and without limitation, any one of LNP systems LNP001 to LNP240.

[0485] In some embodiments, the CRISPR gene-editing system for the treatment of low back pain comprises one or more sgRNAs targeting exon 1 of eTNFRSF1B. In some embodiments, the CRISPR gene-editing system for the treatment of low back pain comprises one or more sgRNAs targeting exon 2 of eTNFRSF1B. In some embodiments, the CRISPR gene-editing system for the treatment of low back pain comprises one or more sgRNAs targeting exon 3 of eTNFRSF1B. In some embodiments, the CRISPR gene-editing system for the treatment of low back pain comprises one or more sgRNAs targeting exon 4 of eTNFRSF1B. In some embodiments, the CRISPR gene-editing system for the treatment of low back pain comprises one or more sgRNAs targeting exon 5 of eTNFRSF1B. In some embodiments, the CRISPR gene-editing system for the treatment of low back pain comprises one or more sgRNAs targeting exon 6 of eTNFRSF1B. In some embodiments, the CRISPR gene-editing system for the treatment of low back pain comprises one or more sgRNAs targeting exon 7 of eTNFRSF1B. In some embodiments, the CRISPR gene-editing system for the treatment of low back pain comprises one or more sgRNAs targeting exon 8 of eTNFRSF1B. In some embodiments, the CRISPR gene-editing system for the treatment of low back pain comprises one or more sgRNAs targeting exon 9 of eTNFRSF1B. In some embodiments, the CRISPR gene-editing system for the treatment of low back pain comprises one or more sgRNAs targeting exon 10 of eTNFRSF1B. In some embodiments, the CRISPR gene-editing system for the treatment of low back pain comprises one or more sgRNAs targeting exon 11 of eTNFRSF1B. In some embodiments, the CRISPR gene-editing system for the treatment of low back pain comprising one or more sgRNAs targeting an exon of eTNFRSF1B is delivered via one or more lipid nanoparticles (LNPs), the LNPs comprising an LNP system described herein, e.g., and without limitation, any one of LNP systems LNP001 to LNP240.

[0486] In some embodiments, the CRISPR gene-editing system for the treatment of low back pain comprises one or more sgRNAs targeting exon 1 of fTNFRSF1B. In some embodiments, the CRISPR gene-editing system for the treatment of low back pain comprises one or more sgRNAs targeting exon 2 of fTNFRSF1B. In some embodiments, the CRISPR gene-editing system for the treatment of low back pain comprises one or more sgRNAs targeting exon 3 of fTNFRSF1B. In some embodiments, the CRISPR gene-editing system for the treatment of low back pain comprises one or more sgRNAs targeting exon 4 of fTNFRSF1B. In some embodiments, the CRISPR gene-editing system for the treatment of low back pain comprises one or more sgRNAs targeting exon 5 of fTNFRSF1B. In some embodiments, the CRISPR gene-editing system for the treatment of low back pain comprises one or more sgRNAs targeting exon 6 of fTNFRSF1B. In some embodiments, the CRISPR gene-editing system for the treatment of low back pain comprises one or more sgRNAs targeting exon 7 of fTNFRSF1B. In some embodiments, the CRISPR gene-editing system for the treatment of low back pain comprises one or more sgRNAs targeting exon 8 of fTNFRSF1B. In some embodiments, the CRISPR gene-editing system for the treatment of low back pain comprises one or more sgRNAs targeting exon 9 of fTNFRSF1B. In some embodiments, the CRISPR gene-editing system for the treatment of low back pain comprises one or more sgRNAs targeting exon 10 of fTNFRSF1B. In some embodiments, the CRISPR gene-editing system for the treatment of low back pain comprising one or more sgRNAs targeting an exon of fTNFRSF1B is delivered via one or more lipid nanoparticles (LNPs), the LNPs comprising an LNP system described herein, e.g., and without limitation, any one of LNP systems LNP001 to LNP240.

[0487] In some embodiments, the CRISPR gene-editing system for the treatment of low back pain comprises one or more sgRNAs targeting TNFRSF3. In some embodiments, the CRISPR gene-editing system for the treatment of low back pain comprises one or more sgRNAs targeting hTNFRSF3. In some embodiments, the CRISPR gene-editing system for the treatment of low back pain comprises one or more sgRNAs targeting cTNFRSF3. In some embodiments, the CRISPR gene-editing system for the treatment of low back pain comprises one or more sgRNAs targeting eTNFRSF3. In some embodiments, the CRISPR gene-editing system for the treatment of low back pain comprises one or more sgRNAs targeting fTNFRSF3. In some embodiments, the CRISPR gene-editing system for the treatment of low back pain comprising one or more sgRNAs targeting an exon of TNFRSF3 is delivered via one or more lipid nanoparticles (LNPs), the LNPs comprising an LNP system described herein, e.g., and without limitation, any one of LNP systems LNP001 to LNP240.

[0488] In some embodiments, the CRISPR gene-editing system for the treatment of low back pain comprises one or more sgRNAs targeting exon 1 of hTNFRSF3. In some embodiments, the CRISPR gene-editing system for the treatment of low back pain comprises one or more sgRNAs targeting exon 2 of hTNFRSF3. In some embodiments, the CRISPR gene-editing system for the treatment of low back pain comprises one or more sgRNAs targeting exon 3 of hTNFRSF3. In some embodiments, the CRISPR gene-editing system for the treatment of low back pain comprises one or more sgRNAs targeting exon 4 of hTNFRSF3. In some embodiments, the CRISPR gene-editing system for the treatment of low back pain comprises one or more sgRNAs targeting exon 5 of hTNFRSF3. In some embodiments, the CRISPR gene-editing system for the treatment of low back pain comprises one or more sgRNAs targeting exon 6 of hTNFRSF3. In some embodiments, the CRISPR gene-editing system for the treatment of low back pain comprises one or more sgRNAs targeting exon 7 of hTNFRSF3. In some embodiments, the CRISPR gene-editing system for the treatment of low back pain comprises one or more sgRNAs targeting exon 8 of hTNFRSF3. In some embodiments, the CRISPR gene-editing system for the treatment of low back pain comprises one or more sgRNAs targeting exon 9 of hTNFRSF3. In some embodiments, the CRISPR gene-editing system for the treatment of low back pain comprises one or more sgRNAs targeting exon 10 of hTNFRSF3. In some embodiments, the CRISPR gene-editing system for the treatment of low back pain comprises one or more sgRNAs targeting exon 11 of hTNFRSF3. In some embodiments, the CRISPR gene-editing system for the treatment of low back pain comprises one or more sgRNAs targeting exon 12 of hTNFRSF3. In some embodiments, the CRISPR gene-editing system for the treatment of low back pain comprising one or more sgRNAs targeting an exon of hTNFRSF3 is delivered via one or more lipid nanoparticles (LNPs), the LNPs comprising an LNP system described herein, e.g., and without limitation, any one of LNP systems LNP001 to LNP240.

[0489] In some embodiments, the CRISPR gene-editing system for the treatment of low back pain comprises one or more sgRNAs targeting exon 1 of cTNFRSF3. In some embodiments, the CRISPR gene-editing system for the treatment of low back pain comprises one or more sgRNAs targeting exon 2 of cTNFRSF3. In some embodiments, the CRISPR gene-editing system for the treatment of low back pain comprises one or more sgRNAs targeting exon 3 of cTNFRSF3. In some embodiments, the CRISPR gene-editing system for the treatment of low back pain comprises one or more sgRNAs targeting exon 4 of cTNFRSF3. In some embodiments, the CRISPR gene-editing system for the treatment of low back pain comprises one or more sgRNAs targeting exon 5 of cTNFRSF3. In some embodiments, the CRISPR gene-editing system for the treatment of low back pain comprises one or more sgRNAs targeting exon 6 of cTNFRSF3. In some embodiments, the CRISPR gene-editing system for the treatment of low back pain comprises one or more sgRNAs targeting exon 7 of cTNFRSF3. In some embodiments, the CRISPR gene-editing system for the treatment of low back pain comprises one or more sgRNAs targeting exon 8 of cTNFRSF3. In some embodiments, the CRISPR gene-editing system for the treatment of low back pain comprises one or more sgRNAs targeting exon 9 of cTNFRSF3. In some embodiments, the CRISPR gene-editing system for the treatment of low back pain comprises one or more sgRNAs targeting exon 10 of cTNFRSF3. In some embodiments, the CRISPR gene-editing system for the treatment of low back pain comprising one or more sgRNAs targeting an exon of cTNFRSF3 is delivered via one or more lipid nanoparticles (LNPs), the LNPs comprising an LNP system described herein, e.g., and without limitation, any one of LNP systems LNP001 to LNP240.

[0490] In some embodiments, the CRISPR gene-editing system for the treatment of low back pain comprises one or more sgRNAs targeting exon 1 of eTNFRSF3. In some embodiments, the CRISPR gene-editing system for the treatment of low back pain comprises one or more sgRNAs targeting exon 2 of eTNFRSF3. In some embodiments, the CRISPR gene-editing system for the treatment of low back pain comprises one or more sgRNAs targeting exon 3 of eTNFRSF3. In some embodiments, the CRISPR gene-editing system for the treatment of low back pain comprises one or more sgRNAs targeting exon 4 of eTNFRSF3. In some embodiments, the CRISPR gene-editing system for the treatment of low back pain comprises one or more sgRNAs targeting exon 5 of eTNFRSF3. In some embodiments, the CRISPR gene-editing system for the treatment of low back pain comprises one or more sgRNAs targeting exon 6 of eTNFRSF3. In some embodiments, the CRISPR gene-editing system for the treatment of low back pain comprises one or more sgRNAs targeting exon 7 of eTNFRSF3. In some embodiments, the CRISPR gene-editing system for the treatment of low back pain comprises one or more sgRNAs targeting exon 8 of eTNFRSF3. In some embodiments, the CRISPR gene-editing system for the treatment of low back pain comprises one or more sgRNAs targeting exon 9 of eTNFRSF3. In some embodiments, the CRISPR gene-editing system for the treatment of low back pain comprises one or more sgRNAs targeting exon 10 of eTNFRSF3. In some embodiments, the CRISPR gene-editing system for the treatment of low back pain comprising one or more sgRNAs targeting an exon of eTNFRSF3 is delivered via one or more lipid nanoparticles (LNPs), the LNPs comprising an LNP system described herein, e.g., and without limitation, any one of LNP systems LNP001 to LNP240.

[0491] In some embodiments, the CRISPR gene-editing system for the treatment of low back pain comprises one or more sgRNAs targeting exon 1 of fTNFRSF3. In some embodiments, the CRISPR gene-editing system for the treatment of low back pain comprises one or more sgRNAs targeting exon 2 of fTNFRSF3. In some embodiments, the CRISPR gene-editing system for the treatment of low back pain comprises one or more sgRNAs targeting exon 3 of fTNFRSF3. In some embodiments, the CRISPR gene-editing system for the treatment of low back pain comprises one or more sgRNAs targeting exon 4 of fTNFRSF3. In some embodiments, the CRISPR gene-editing system for the treatment of low back pain comprises one or more sgRNAs targeting exon 5 of fTNFRSF3. In some embodiments, the CRISPR gene-editing system for the treatment of low back pain comprises one or more sgRNAs targeting exon 6 of fTNFRSF3. In some embodiments, the CRISPR gene-editing system for the treatment of low back pain comprises one or more sgRNAs targeting exon 7 of fTNFRSF3. In some embodiments, the CRISPR gene-editing system for the treatment of low back pain comprises one or more sgRNAs targeting exon 8 of fTNFRSF3. In some embodiments, the CRISPR gene-editing system for the treatment of low back pain comprises one or more sgRNAs targeting exon 9 of fTNFRSF3. In some embodiments, the CRISPR gene-editing system for the treatment of low back pain comprises one or more sgRNAs targeting exon 10 of fTNFRSF3. In some embodiments, the CRISPR gene-editing system for the treatment of low back pain comprising one or more sgRNAs targeting an exon of fTNFRSF3 is delivered via one or more lipid nanoparticles (LNPs), the LNPs comprising an LNP system described herein, e.g., and without limitation, any one of LNP systems LNP001 to LNP240.

[0492] In some embodiments, the CRISPR gene-editing system for the treatment of low back pain comprises one or more sgRNAs targeting TNFRSF4. In some embodiments, the CRISPR gene-editing system for the treatment of low back pain comprises one or more sgRNAs targeting hTNFRSF4. In some embodiments, the CRISPR gene-editing system for the treatment of low back pain comprises one or more sgRNAs targeting cTNFRSF4. In some embodiments, the CRISPR gene-editing system for the treatment of low back pain comprises one or more sgRNAs targeting eTNFRSF4. In some embodiments, the CRISPR gene-editing system for the treatment of low back pain comprises one or more sgRNAs targeting fTNFRSF4. In some embodiments, the CRISPR gene-editing system for the treatment of low back pain comprising one or more sgRNAs targeting an exon of TNFRSF4 is delivered via one or more lipid nanoparticles (LNPs), the LNPs comprising an LNP system described herein, e.g., and without limitation, any one of LNP systems LNP001 to LNP240.

[0493] In some embodiments, the CRISPR gene-editing system for the treatment of low back pain comprises one or more sgRNAs targeting exon 1 of hTNFRSF4. In some embodiments, the CRISPR gene-editing system for the treatment of low back pain comprises one or more sgRNAs targeting exon 2 of hTNFRSF4. In some embodiments, the CRISPR gene-editing system for the treatment of low back pain comprises one or more sgRNAs targeting exon 3 of hTNFRSF4. In some embodiments, the CRISPR gene-editing system for the treatment of low back pain comprises one or more sgRNAs targeting exon 4 of hTNFRSF4. In some embodiments, the CRISPR gene-editing system for the treatment of low back pain comprises one or more sgRNAs targeting exon 5 of hTNFRSF4. In some embodiments, the CRISPR gene-editing system for the treatment of low back pain comprises one or more sgRNAs targeting exon 6 of hTNFRSF4. In some embodiments, the CRISPR gene-editing system for the treatment of low back pain comprising one or more sgRNAs targeting an exon of hTNFRSF4 is delivered via one or more lipid nanoparticles (LNPs), the LNPs comprising an LNP system described herein, e.g., and without limitation, any one of LNP systems LNP001 to LNP240.

[0494] In some embodiments, the CRISPR gene-editing system for the treatment of low back pain comprises one or more sgRNAs targeting exon 1 of cTNFRSF4. In some embodiments, the CRISPR gene-editing system for the treatment of low back pain comprises one or more sgRNAs targeting exon 2 of cTNFRSF4. In some embodiments, the CRISPR gene-editing system for the treatment of low back pain comprises one or more sgRNAs targeting exon 3 of cTNFRSF4. In some embodiments, the CRISPR gene-editing system for the treatment of low back pain comprises one or more sgRNAs targeting exon 4 of cTNFRSF4. In some embodiments, the CRISPR gene-editing system for the treatment of low back pain comprises one or more sgRNAs targeting exon 5 of cTNFRSF4. In some embodiments, the CRISPR gene-editing system for the treatment of low back pain comprises one or more sgRNAs targeting exon 6 of cTNFRSF4. In some embodiments, the CRISPR gene-editing system for the treatment of low back pain comprises one or more sgRNAs targeting exon 7 of cTNFRSF4. In some embodiments, the CRISPR gene-editing system for the treatment of low back pain comprising one or more sgRNAs targeting an exon of cTNFRSF4 is delivered via one or more lipid nanoparticles (LNPs), the LNPs comprising an LNP system described herein, e.g., and without limitation, any one of LNP systems LNP001 to LNP240.

[0495] In some embodiments, the CRISPR gene-editing system for the treatment of low back pain comprises one or more sgRNAs targeting exon 1 of eTNFRSF4. In some embodiments, the CRISPR gene-editing system for the treatment of low back pain comprises one or more sgRNAs targeting exon 2 of eTNFRSF4. In some embodiments, the CRISPR gene-editing system for the treatment of low back pain comprises one or more sgRNAs targeting exon 3 of eTNFRSF4. In some embodiments, the CRISPR gene-editing system for the treatment of low back pain comprises one or more sgRNAs targeting exon 4 of eTNFRSF4. In some embodiments, the CRISPR gene-editing system for the treatment of low back pain comprises one or more sgRNAs targeting exon 5 of eTNFRSF4. In some embodiments, the CRISPR gene-editing system for the treatment of low back pain comprises one or more sgRNAs targeting exon 6 of eTNFRSF4. In some embodiments, the CRISPR gene-editing system for the treatment of low back pain comprises one or more sgRNAs targeting exon 7 of eTNFRSF4. In some embodiments, the CRISPR gene-editing system for the treatment of low back pain comprising one or more sgRNAs targeting an exon of eTNFRSF4 is delivered via one or more lipid nanoparticles (LNPs), the LNPs comprising an LNP system described herein, e.g., and without limitation, any one of LNP systems LNP001 to LNP240.

[0496] In some embodiments, the CRISPR gene-editing system for the treatment of low back pain comprises one or more sgRNAs targeting exon 1 of fTNFRSF4. In some embodiments, the CRISPR gene-editing system for the treatment of low back pain comprises one or more sgRNAs targeting exon 2 of fTNFRSF4. In some embodiments, the CRISPR gene-editing system for the treatment of low back pain comprises one or more sgRNAs targeting exon 3 of fTNFRSF4. In some embodiments, the CRISPR gene-editing system for the treatment of low back pain comprises one or more sgRNAs targeting exon 4 of fTNFRSF4. In some embodiments, the CRISPR gene-editing system for the treatment of low back pain comprises one or more sgRNAs targeting exon 5 of fTNFRSF4. In some embodiments, the CRISPR gene-editing system for the treatment of low back pain comprises one or more sgRNAs targeting exon 6 of fTNFRSF4. In some embodiments, the CRISPR gene-editing system for the treatment of low back pain comprises one or more sgRNAs targeting exon 7 of fTNFRSF4. In some embodiments, the CRISPR gene-editing system for the treatment of low back pain comprising one or more sgRNAs targeting an exon of fTNFRSF4 is delivered via one or more lipid nanoparticles (LNPs), the LNPs comprising an LNP system described herein, e.g., and without limitation, any one of LNP systems LNP001 to LNP240.

[0497] In some embodiments, the CRISPR gene-editing system for the treatment of low back pain comprises one or more sgRNAs targeting TNFRSF11A. In some embodiments, the CRISPR gene-editing system for the treatment of low back pain comprises one or more sgRNAs targeting hTNFRSF11A. In some embodiments, the CRISPR gene-editing system for the treatment of low back pain comprises one or more sgRNAs targeting cTNFRSF11A. In some embodiments, the CRISPR gene-editing system for the treatment of low back pain comprises one or more sgRNAs targeting eTNFRSF11A. In some embodiments, the CRISPR gene-editing system for the treatment of low back pain comprises one or more sgRNAs targeting fTNFRSF11A. In some embodiments, the CRISPR gene-editing system for the treatment of low back pain comprising one or more sgRNAs targeting an exon of TNFRSF11A is delivered via one or more lipid nanoparticles (LNPs), the LNPs comprising an LNP system described herein, e.g., and without limitation, any one of LNP systems LNP001 to LNP240.

[0498] In some embodiments, the CRISPR gene-editing system for the treatment of low back pain comprises one or more sgRNAs targeting exon 1 of hTNFRSF11A. In some embodiments, the CRISPR gene-editing system for the treatment of low back pain comprises one or more sgRNAs targeting exon 2 of hTNFRSF11A. In some embodiments, the CRISPR gene-editing system for the treatment of low back pain comprises one or more sgRNAs targeting exon 3 of hTNFRSF11A. In some embodiments, the CRISPR gene-editing system for the treatment of low back pain comprises one or more sgRNAs targeting exon 4 of hTNFRSF11A. In some embodiments, the CRISPR gene-editing system for the treatment of low back pain comprises one or more sgRNAs targeting exon 5 of hTNFRSF11A. In some embodiments, the CRISPR gene-editing system for the treatment of low back pain comprises one or more sgRNAs targeting exon 6 of hTNFRSF11A. In some embodiments, the CRISPR gene-editing system for the treatment of low back pain comprises one or more sgRNAs targeting exon 7 of hTNFRSF11A. In some embodiments, the CRISPR gene-editing system for the treatment of low back pain comprises one or more sgRNAs targeting exon 8 of hTNFRSF11A. In some embodiments, the CRISPR gene-editing system for the treatment of low back pain comprises one or more sgRNAs targeting exon 9 of hTNFRSF11A. In some embodiments, the CRISPR gene-editing system for the treatment of low back pain comprises one or more sgRNAs targeting exon 10 of hTNFRSF11A. In some embodiments, the CRISPR gene-editing system for the treatment of low back pain comprises one or more sgRNAs targeting exon 11 of hTNFRSF11A. In some embodiments, the CRISPR gene-editing system for the treatment of low back pain comprises one or more sgRNAs targeting exon 12 of hTNFRSF11A. In some embodiments, the CRISPR gene-editing system for the treatment of low back pain comprising one or more sgRNAs targeting an exon of hTNFRSF11A is delivered via one or more lipid nanoparticles (LNPs), the LNPs comprising an LNP system described herein, e.g., and without limitation, any one of LNP systems LNP001 to LNP240.

[0499] In some embodiments, the CRISPR gene-editing system for the treatment of low back pain comprises one or more sgRNAs targeting exon 1 of cTNFRSF11A. In some embodiments, the CRISPR gene-editing system for the treatment of low back pain comprises one or more sgRNAs targeting exon 2 of cTNFRSF11A. In some embodiments, the CRISPR gene-editing system for the treatment of low back pain comprises one or more sgRNAs targeting exon 3 of cTNFRSF11A. In some embodiments, the CRISPR gene-editing system for the treatment of low back pain comprises one or more sgRNAs targeting exon 4 of cTNFRSF11A. In some embodiments, the CRISPR gene-editing system for the treatment of low back pain comprises one or more sgRNAs targeting exon 5 of cTNFRSF11A. In some embodiments, the CRISPR gene-editing system for the treatment of low back pain comprises one or more sgRNAs targeting exon 6 of cTNFRSF11A. In some embodiments, the CRISPR gene-editing system for the treatment of low back pain comprises one or more sgRNAs targeting exon 7 of cTNFRSF11A. In some embodiments, the CRISPR gene-editing system for the treatment of low back pain comprises one or more sgRNAs targeting exon 8 of cTNFRSF11A. In some embodiments, the CRISPR gene-editing system for the treatment of low back pain comprises one or more sgRNAs targeting exon 9 of cTNFRSF11A. In some embodiments, the CRISPR gene-editing system for the treatment of low back pain comprises one or more sgRNAs targeting exon 10 of cTNFRSF11A. In some embodiments, the CRISPR gene-editing system for the treatment of low back pain comprises one or more sgRNAs targeting exon 11 of cTNFRSF11A. In some embodiments, the CRISPR gene-editing system for the treatment of low back pain comprising one or more sgRNAs targeting an exon of cTNFRSF11A is delivered via one or more lipid nanoparticles (LNPs), the LNPs comprising an LNP system described herein, e.g., and without limitation, any one of LNP systems LNP001 to LNP240.

[0500] In some embodiments, the CRISPR gene-editing system for the treatment of low back pain comprises one or more sgRNAs targeting exon 1 of eTNFRSF11A. In some embodiments, the CRISPR gene-editing system for the treatment of low back pain comprises one or more sgRNAs targeting exon 2 of eTNFRSF11A. In some embodiments, the CRISPR gene-editing system for the treatment of low back pain comprises one or more sgRNAs targeting exon 3 of eTNFRSF11A. In some embodiments, the CRISPR gene-editing system for the treatment of low back pain comprises one or more sgRNAs targeting exon 4 of eTNFRSF11A. In some embodiments, the CRISPR gene-editing system for the treatment of low back pain comprises one or more sgRNAs targeting exon 5 of eTNFRSF11A. In some embodiments, the CRISPR gene-editing system for the treatment of low back pain comprises one or more sgRNAs targeting exon 6 of eTNFRSF11A. In some embodiments, the CRISPR gene-editing system for the treatment of low back pain comprises one or more sgRNAs targeting exon 7 of eTNFRSF11A. In some embodiments, the CRISPR gene-editing system for the treatment of low back pain comprises one or more sgRNAs targeting exon 8 of eTNFRSF11A. In some embodiments, the CRISPR gene-editing system for the treatment of low back pain comprises one or more sgRNAs targeting exon 9 of eTNFRSF11A. In some embodiments, the CRISPR gene-editing system for the treatment of low back pain comprises one or more sgRNAs targeting exon 10 of eTNFRSF11A. In some embodiments, the CRISPR gene-editing system for the treatment of low back pain comprising one or more sgRNAs targeting an exon of eTNFRSF11A is delivered via one or more lipid nanoparticles (LNPs), the LNPs comprising an LNP system described herein, e.g., and without limitation, any one of LNP systems LNP001 to LNP240.

[0501] In some embodiments, the CRISPR gene-editing system for the treatment of low back pain comprises one or more sgRNAs targeting exon 1 of fTNFRSF11A. In some embodiments, the CRISPR gene-editing system for the treatment of low back pain comprises one or more sgRNAs targeting exon 2 of fTNFRSF11A. In some embodiments, the CRISPR gene-editing system for the treatment of low back pain comprises one or more sgRNAs targeting exon 3 of fTNFRSF11A. In some embodiments, the CRISPR gene-editing system for the treatment of low back pain comprises one or more sgRNAs targeting exon 4 of fTNFRSF11A. In some embodiments, the CRISPR gene-editing system for the treatment of low back pain comprises one or more sgRNAs targeting exon 5 of fTNFRSF11A. In some embodiments, the CRISPR gene-editing system for the treatment of low back pain comprises one or more sgRNAs targeting exon 6 of fTNFRSF11A. In some embodiments, the CRISPR gene-editing system for the treatment of low back pain comprises one or more sgRNAs targeting exon 7 of fTNFRSF11A. In some embodiments, the CRISPR gene-editing system for the treatment of low back pain comprises one or more sgRNAs targeting exon 8 of fTNFRSF11A. In some embodiments, the CRISPR gene-editing system for the treatment of low back pain comprises one or more sgRNAs targeting exon 9 of fTNFRSF11A. In some embodiments, the CRISPR gene-editing system for the treatment of low back pain comprises one or more sgRNAs targeting exon 10 of fTNFRSF11A. In some embodiments, the CRISPR gene-editing system for the treatment of low back pain comprises one or more sgRNAs targeting exon 11 of fTNFRSF11A. In some embodiments, the CRISPR gene-editing system for the treatment of low back pain comprising one or more sgRNAs targeting an exon of fTNFRSF11A is delivered via one or more lipid nanoparticles (LNPs), the LNPs comprising an LNP system described herein, e.g., and without limitation, any one of LNP systems LNP001 to LNP240.

### C. DDD

[0502] In one aspect, the present disclosure encompasses treatments for degenerative disc disorder (DDD). In some embodiments, the DDD treatment comprises a therapeutically effective amount of a Clustered Regularly Interspaced Short Palindromic Repeats (CRISPR) gene-editing system, the system comprising: (i) a CRISPR Associated (Cas) protein; and (ii) at least one guide RNA targeting IL1R1. In some embodiments, the DDD treatment comprises a CRISPR gene-editing system targeting hIL1R1. In some embodiments, the DDD treatment comprises a CRISPR gene-editing system targeting cIL1R1. In some embodiments, the DDD treatment comprises a CRISP gene-editing system R targeting eIL1R1. In some embodiments, the DDD treatment comprises a CRISPR gene-editing system targeting fIL1R1. In some embodiments, the CRISPR gene-editing system for the treatment of DDD comprising one or more sgRNAs targeting an exon of IL1R1 is delivered via one or more lipid nanoparticles (LNPs), the LNPs comprising an LNP system described herein, e.g., and without limitation, any one of LNP systems LNP001 to LNP240.

[0503] In some embodiments, the CRISPR gene-editing system for the treatment of DDD comprises one or more sgRNAs targeting exon 1 of hIL1R1. In some embodiments, the CRISPR gene-editing system for the treatment of DDD comprises one or more sgRNAs targeting exon 2 of hIL1R1. In some embodiments, the CRISPR gene-editing system for the treatment of DDD comprises one or more sgRNAs targeting exon 3 of hIL1R1. In some embodiments, the CRISPR gene-editing system for the treatment of DDD comprises one or more sgRNAs targeting exon 4 of hIL1R1. In some embodiments, the CRISPR gene-editing system for the treatment of DDD comprises one or more sgRNAs targeting exon 5 of hIL1R1. In some embodiments, the CRISPR gene-editing system for the treatment of DDD comprises one or more sgRNAs targeting exon 6 of hIL1R1. In some embodiments, the CRISPR gene-editing system for the treatment of DDD comprises one or more sgRNAs targeting exon 7 of hIL1R1. In some embodiments, the CRISPR gene-editing system for the treatment of DDD comprises one or more sgRNAs targeting exon 8 of hIL1R1. In some embodiments, the CRISPR gene-editing system for the treatment of DDD comprises one or more sgRNAs targeting exon 9 of hIL1R1. In some embodiments, the CRISPR gene-editing system for the treatment of DDD comprises one or more sgRNAs targeting exon 10 of hIL1R1. In some embodiments, the CRISPR gene-editing system for the treatment of DDD comprises one or more sgRNAs targeting exon 11 of hIL1R1. In some embodiments, the CRISPR gene-editing system for the treatment of DDD comprises one or more sgRNAs targeting exon 12 of hIL1R1. In some embodiments, the CRISPR gene-editing system for the treatment of DDD comprises one or more sgRNAs targeting exon 13 of hIL1R1. In some embodiments, the CRISPR gene-editing system for the treatment of DDD comprises one or more sgRNAs targeting exon 14 of hIL1R1. In some embodiments, the CRISPR gene-editing system for the treatment of DDD comprises one or more sgRNAs targeting exon 15 of hIL1R1. In some embodiments, the CRISPR gene-editing system for the treatment of DDD comprises one or more sgRNAs targeting exon 16 of hIL1R1. In some embodiments, the CRISPR gene-editing system for the treatment of DDD comprises one or more sgRNAs targeting exon 17 of hIL1R1. In some embodiments, the CRISPR gene-editing system for the treatment of DDD comprises one or more sgRNAs targeting exon 18 of hIL1R1. In some embodiments, the CRISPR gene-editing system for the treatment of DDD comprises one or more sgRNAs targeting exon 19 of hIL1R1. In some embodiments, the CRISPR gene-editing system for the treatment of DDD comprises one or more sgRNAs targeting exon 20 of hIL1R1. In some embodiments, the CRISPR gene-editing system for the treatment of DDD comprises one or more sgRNAs targeting exon 21 of hIL1R1. In some embodiments, the CRISPR gene-editing system for the treatment of DDD comprising one or more sgRNAs targeting an exon of hIL1R1 is delivered via one or more lipid nanoparticles (LNPs), the LNPs comprising an LNP system described herein, e.g., and without limitation, any one of LNP systems LNP001 to LNP240.

[0504] In some embodiments, the CRISPR gene-editing system for the treatment of DDD comprises one or more sgRNAs targeting exon 1 of cIL1R1. In some embodiments, the CRISPR gene-editing system for the treatment of DDD comprises one or more sgRNAs targeting exon 2 of cIL1R1. In some embodiments, the CRISPR gene-editing system for the treatment of DDD comprises one or more sgRNAs targeting exon 3 of cIL1R1. In some embodiments, the CRISPR gene-editing system for the treatment of DDD comprises one or more sgRNAs targeting exon 4 of cIL1R1. In some embodiments, the CRISPR gene-editing system for the treatment of DDD comprises one or more sgRNAs targeting exon 5 of cIL1R1. In some embodiments, the CRISPR gene-editing system for the treatment of DDD comprises one or more sgRNAs targeting exon 6 of cIL1R1. In some embodiments, the CRISPR gene-editing system for the treatment of DDD comprises one or more sgRNAs targeting exon 7 of cIL1R1. In some embodiments, the CRISPR gene-editing system for the treatment of DDD comprises one or more sgRNAs targeting exon 8 of cIL1R1. In some embodiments, the CRISPR gene-editing system for the treatment of DDD comprises one or more sgRNAs targeting exon 9 of cIL1R1. In some embodiments, the CRISPR gene-editing system for the treatment of DDD comprises one or more sgRNAs targeting exon 10 of cIL1R1. In some embodiments, the CRISPR gene-editing system for the treatment of DDD comprises one or more sgRNAs targeting exon 11 of cIL1R1. In some embodiments, the CRISPR gene-editing system for the treatment of DDD comprises one or more sgRNAs targeting exon 12 of cIL1R1. In some embodiments, the CRISPR gene-editing system for the treatment of DDD comprises one or more sgRNAs targeting exon 13 of cIL1R1. In some embodiments, the CRISPR gene-editing system for the treatment of DDD comprises one or more sgRNAs targeting exon 14 of cIL1R1. In some embodiments, the CRISPR gene-editing system for the treatment of DDD comprises one or more sgRNAs targeting exon 15 of cIL1R1. In some embodiments, the CRISPR gene-editing system for the treatment of DDD comprises one or more sgRNAs targeting exon 16 of cIL1R1. In some embodiments, the CRISPR gene-editing system for the treatment of DDD comprising one or more sgRNAs targeting an exon of cIL1R1 is delivered via one or more lipid nanoparticles (LNPs), the LNPs comprising an LNP system described herein, e.g., and without limitation, any one of LNP systems LNP001 to LNP240.

[0505] In some embodiments, the CRISPR gene-editing system for the treatment of DDD comprises one or more sgRNAs targeting exon 1 of eIL1R1. In some embodiments, the CRISPR gene-editing system for the treatment of DDD comprises one or more sgRNAs targeting exon 2 of eIL1R1. In some embodiments, the CRISPR gene-editing system for the treatment of DDD comprises one or more sgRNAs targeting exon 3 of eIL1R1. In some embodiments, the CRISPR gene-editing system for the treatment of DDD comprises one or more sgRNAs targeting exon 4 of eIL1R1. In some embodiments, the CRISPR gene-editing system for the treatment of DDD comprises one or more sgRNAs targeting exon 5 of eIL1R1. In some embodiments, the CRISPR gene-editing system for the treatment of DDD comprises one or more sgRNAs targeting exon 6 of eIL1R1. In some embodiments, the CRISPR gene-editing system for the treatment of DDD comprises one or more sgRNAs targeting exon 7 of eIL1R1. In some embodiments, the CRISPR gene-editing system for the treatment of DDD comprises one or more sgRNAs targeting exon 8 of eIL1R1. In some embodiments, the CRISPR gene-editing system for the treatment of DDD comprises one or more sgRNAs targeting exon 9 of eIL1R1. In some embodiments, the CRISPR gene-editing system for the treatment of DDD comprises one or more sgRNAs targeting exon 10 of eIL1R1. In some embodiments, the CRISPR gene-editing system for the treatment of DDD comprises one or more sgRNAs targeting exon 11 of eIL1R1. In some embodiments, the CRISPR gene-editing system for the treatment of DDD comprises one or more sgRNAs targeting exon 12 of eIL1R1. In some embodiments, the CRISPR gene-editing system for the treatment of DDD comprises one or more sgRNAs targeting exon 13 of eIL1R1. In some embodiments, the CRISPR gene-editing system for the treatment of DDD comprises one or more sgRNAs targeting exon 14 of eIL1R1. In some embodiments, the CRISPR gene-editing system for the treatment of DDD comprises one or more sgRNAs targeting exon 15 of eIL1R1. In some embodiments, the CRISPR gene-editing system for the treatment of DDD comprising one or more sgRNAs targeting an exon of eIL1R1 is delivered via one or more lipid nanoparticles (LNPs), the LNPs comprising an LNP system described herein, e.g., and without limitation, any one of LNP systems LNP001 to LNP240.

[0506] In some embodiments, the CRISPR gene-editing system for the treatment of DDD comprises one or more sgRNAs targeting exon 1 of fIL1R1. In some embodiments, the CRISPR gene-editing system for the treatment of DDD comprises one or more sgRNAs targeting exon 2 of fIL1R1. In some embodiments, the CRISPR gene-editing system for the treatment of DDD comprises one or more sgRNAs targeting exon 3 of fIL1R1. In some embodiments, the CRISPR gene-editing system for the treatment of DDD comprises one or more sgRNAs targeting exon 4 of fIL1R1. In some embodiments, the CRISPR gene-editing system for the treatment of DDD comprises one or more sgRNAs targeting exon 5 of fIL1R1. In some embodiments, the CRISPR gene-editing system for the treatment of DDD comprises one or more sgRNAs targeting exon 6 of fIL1R1. In some embodiments, the CRISPR gene-editing system for the treatment of DDD comprises one or more sgRNAs targeting exon 7 of fIL1R1. In some embodiments, the CRISPR gene-editing system for the treatment of DDD comprises one or more sgRNAs targeting exon 8 of fIL1R1. In some embodiments, the CRISPR gene-editing system for the treatment of DDD comprises one or more sgRNAs targeting exon 9 of fIL1R1. In some embodiments, the CRISPR gene-editing system for the treatment of DDD comprises one or more sgRNAs targeting exon 10 of fIL1R1. In some embodiments, the CRISPR gene-editing system for the treatment of DDD comprises one or more sgRNAs targeting exon 11 of fIL1R1. In some embodiments, the CRISPR gene-editing system for the treatment of DDD comprises one or more sgRNAs targeting exon 12 of fIL1R1. In some embodiments, the CRISPR gene-editing system for the treatment of DDD comprises one or more sgRNAs targeting exon 13 of fIL1R1. In some embodiments, the CRISPR gene-editing system for the treatment of DDD comprises one or more sgRNAs targeting exon 14 of fIL1R1. In some embodiments, the CRISPR gene-editing system for the treatment of DDD comprises one or more sgRNAs targeting exon 15 of fIL1R1. In some embodiments, the CRISPR gene-editing system for the treatment of DDD comprises one or more sgRNAs targeting exon 16 of fIL1R1. In some embodiments, the CRISPR gene-editing system for the treatment of DDD comprises one or more sgRNAs targeting exon 17 of fIL1R1. In some embodiments, the CRISPR gene-editing system for the treatment of DDD comprises one or more sgRNAs targeting exon 18 of fIL1R1. In some embodiments, the CRISPR gene-editing system for the treatment of DDD comprising one or more sgRNAs targeting an exon of fIL1R1 is delivered via one or more lipid nanoparticles (LNPs), the LNPs comprising an LNP system described herein, e.g., and without limitation, any one of LNP systems LNP001 to LNP240.

[0507] In some embodiments, the CRISPR gene-editing system for the treatment of DDD comprises one or more sgRNAs targeting IL1RAP. In some embodiments, the CRISPR gene-editing system for the treatment of DDD comprises one or more sgRNAs targeting hIL1RAP. In some embodiments, the CRISPR gene-editing system for the treatment of DDD comprises one or more sgRNAs targeting cIL1RAP. In some embodiments, the CRISPR gene-editing system for the treatment of DDD comprises one or more sgRNAs targeting eIL1RAP. In some embodiments, the CRISPR gene-editing system for the treatment of DDD comprises one or more sgRNAs targeting fIL1RAP. In some embodiments, the CRISPR gene-editing system for the treatment of DDD comprising one or more sgRNAs targeting an exon of IL1RAP is delivered via one or more lipid nanoparticles (LNPs), the LNPs comprising an LNP system described herein, e.g., and without limitation, any one of LNP systems LNP001 to LNP240.

[0508] In some embodiments, the CRISPR gene-editing system for the treatment of DDD comprises one or more sgRNAs targeting exon 1 of hIL1RAP. In some embodiments, the CRISPR gene-editing system for the treatment of DDD comprises one or more sgRNAs targeting exon 2 of hIL1RAP. In some embodiments, the CRISPR gene-editing system for the treatment of DDD comprises one or more sgRNAs targeting exon 3 of hIL1RAP. In some embodiments, the CRISPR gene-editing system for the treatment of DDD comprises one or more sgRNAs targeting exon 4 of hIL1RAP. In some embodiments, the CRISPR gene-editing system for the treatment of DDD comprises one or more sgRNAs targeting exon 5 of hIL1RAP. In some embodiments, the CRISPR gene-editing system for the treatment of DDD comprises one or more sgRNAs targeting exon 6 of hIL1RAP. In some embodiments, the CRISPR gene-editing system for the treatment of DDD comprises one or more sgRNAs targeting exon 7 of hIL1RAP. In some embodiments, the CRISPR gene-editing system for the treatment of DDD comprises one or more sgRNAs targeting exon 8 of hIL1RAP. In some embodiments, the CRISPR gene-editing system for the treatment of DDD comprises one or more sgRNAs targeting exon 9 of hIL1RAP. In some embodiments, the CRISPR gene-editing system for the treatment of DDD comprises one or more sgRNAs targeting exon 10 of hIL1RAP. In some embodiments, the CRISPR gene-editing system for the treatment of DDD comprises one or more sgRNAs targeting exon 11 of hIL1RAP. In some embodiments, the CRISPR gene-editing system for the treatment of DDD comprises one or more sgRNAs targeting exon 12 of hIL1RAP. In some embodiments, the CRISPR gene-editing system for the treatment of DDD comprises one or more sgRNAs targeting exon 13 of hIL1RAP. In some embodiments, the CRISPR gene-editing system for the treatment of DDD comprises one or more sgRNAs targeting exon 14 of hIL1RAP. In some embodiments, the CRISPR gene-editing system for the treatment of DDD comprises one or more sgRNAs targeting exon 15 of hIL1RAP. In some embodiments, the CRISPR gene-editing system for the treatment of DDD comprises one or more sgRNAs targeting exon 16 of hIL1RAP. In some embodiments, the CRISPR gene-editing system for the treatment of DDD comprises one or more sgRNAs targeting exon 17 of hIL1RAP. In some embodiments, the CRISPR gene-editing system for the treatment of DDD comprising one or more sgRNAs targeting an exon of hIL1RAP is delivered via one or more lipid nanoparticles (LNPs), the LNPs comprising an LNP system described herein, e.g., and without limitation, any one of LNP systems LNP001 to LNP240.

[0509] In some embodiments, the CRISPR gene-editing system for the treatment of DDD comprises one or more sgRNAs targeting exon 1 of cIL1RAP. In some embodiments, the CRISPR gene-editing system for the treatment of DDD comprises one or more sgRNAs targeting exon 2 of cIL1RAP. In some embodiments, the CRISPR gene-editing system for the treatment of DDD comprises one or more sgRNAs targeting exon 3 of cIL1RAP. In some embodiments, the CRISPR gene-editing system for the treatment of DDD comprises one or more sgRNAs targeting exon 4 of cIL1RAP. In some embodiments, the CRISPR gene-editing system for the treatment of DDD comprises one or more sgRNAs targeting exon 5 of cIL1RAP. In some embodiments, the CRISPR gene-editing system for the treatment of DDD comprises one or more sgRNAs targeting exon 6 of cIL1RAP. In some embodiments, the CRISPR gene-editing system for the treatment of DDD comprises one or more sgRNAs targeting exon 7 of cIL1RAP. In some embodiments, the CRISPR gene-editing system for the treatment of DDD comprises one or more sgRNAs targeting exon 8 of cIL1RAP. In some embodiments, the CRISPR gene-editing system for the treatment of DDD comprises one or more sgRNAs targeting exon 9 of cIL1RAP. In some embodiments, the CRISPR gene-editing system for the treatment of DDD comprises one or more sgRNAs targeting exon 10 of cIL1RAP. In some embodiments, the CRISPR gene-editing system for the treatment of DDD comprises one or more sgRNAs targeting exon 11 of cIL1RAP. In some embodiments, the CRISPR gene-editing system for the treatment of DDD comprises one or more sgRNAs targeting exon 12 of cIL1RAP. In some embodiments, the CRISPR gene-editing system for the treatment of DDD comprises one or more sgRNAs targeting exon 13 of cIL1RAP. In some embodiments, the CRISPR gene-editing system for the treatment of DDD comprises one or more sgRNAs targeting exon 14 of cIL1RAP. In some embodiments, the CRISPR gene-editing system for the treatment of DDD comprises one or more sgRNAs targeting exon 15 of cIL1RAP. In some embodiments, the CRISPR gene-editing system for the treatment of DDD comprises one or more sgRNAs targeting exon 16 of cIL1RAP. In some embodiments, the CRISPR gene-editing system for the treatment of DDD comprising one or more sgRNAs targeting an exon of cIL1RAP is delivered via one or more lipid nanoparticles (LNPs), the LNPs comprising an LNP system described herein, e.g., and without limitation, any one of LNP systems LNP001 to LNP240.

[0510] In some embodiments, the CRISPR gene-editing system for the treatment of DDD comprises one or more sgRNAs targeting exon 1 of eIL1RAP. In some embodiments, the CRISPR gene-editing system for the treatment of DDD comprises one or more sgRNAs targeting exon 2 of eIL1RAP. In some embodiments, the CRISPR gene-editing system for the treatment of DDD comprises one or more sgRNAs targeting exon 3 of eIL1RAP. In some embodiments, the CRISPR gene-editing system for the treatment of DDD comprises one or more sgRNAs targeting exon 4 of eIL1RAP. In some embodiments, the CRISPR gene-editing system for the treatment of DDD comprises one or more sgRNAs targeting exon 5 of eIL1RAP. In some embodiments, the CRISPR gene-editing system for the treatment of DDD comprises one or more sgRNAs targeting exon 6 of eIL1RAP. In some embodiments, the CRISPR gene-editing system for the treatment of DDD comprises one or more sgRNAs targeting exon 7 of eIL1RAP. In some embodiments, the CRISPR gene-editing system for the treatment of DDD comprises one or more sgRNAs targeting exon 8 of eIL1RAP. In some embodiments, the CRISPR gene-editing system for the treatment of DDD comprises one or more sgRNAs targeting exon 9 of eIL1RAP. In some embodiments, the CRISPR gene-editing system for the treatment of DDD comprises one or more sgRNAs targeting exon 10 of eIL1RAP. In some embodiments, the CRISPR gene-editing system for the treatment of DDD comprises one or more sgRNAs targeting exon 11 of eIL1RAP. In some embodiments, the CRISPR gene-editing system for the treatment of DDD comprises one or more sgRNAs targeting exon 12 of eIL1RAP. In some embodiments, the CRISPR gene-editing system for the treatment of DDD comprises one or more sgRNAs targeting exon 13 of eIL1RAP. In some embodiments, the CRISPR gene-editing system for the treatment of DDD comprising one or more sgRNAs targeting an exon of eIL1RAP is delivered via one or more lipid nanoparticles (LNPs), the LNPs comprising an LNP system described herein, e.g., and without limitation, any one of LNP systems LNP001 to LNP240.

[0511] In some embodiments, the CRISPR gene-editing system for the treatment of DDD comprises one or more sgRNAs targeting exon 1 of fIL1RAP. In some embodiments, the CRISPR gene-editing system for the treatment of DDD comprises one or more sgRNAs targeting exon 2 of fIL1RAP. In some embodiments, the CRISPR gene-editing system for the treatment of DDD comprises one or more sgRNAs targeting exon 3 of fIL1RAP. In some embodiments, the CRISPR gene-editing system for the treatment of DDD comprises one or more sgRNAs targeting exon 4 of fIL1RAP. In some embodiments, the CRISPR gene-editing system for the treatment of DDD comprises one or more sgRNAs targeting exon 5 of fIL1RAP. In some embodiments, the CRISPR gene-editing system for the treatment of DDD comprises one or more sgRNAs targeting exon 6 of fIL1RAP. In some embodiments, the CRISPR gene-editing system for the treatment of DDD comprises one or more sgRNAs targeting exon 7 of fIL1RAP. In some embodiments, the CRISPR gene-editing system for the treatment of DDD comprises one or more sgRNAs targeting exon 8 of fIL1RAP. In some embodiments, the CRISPR gene-editing system for the treatment of DDD comprises one or more sgRNAs targeting exon 9 of fIL1RAP. In some embodiments, the CRISPR gene-editing system for the treatment of DDD comprises one or more sgRNAs targeting exon 10 of fIL1RAP. In some embodiments, the CRISPR gene-editing system for the treatment of DDD comprises one or more sgRNAs targeting exon 11 of fIL1RAP. In some embodiments, the CRISPR gene-editing system for the treatment of DDD comprises one or more sgRNAs targeting exon 12 of fIL1RAP. In some embodiments, the CRISPR gene-editing system for the treatment of DDD comprises one or more sgRNAs targeting exon 13 of fIL1RAP. In some embodiments, the CRISPR gene-editing system for the treatment of DDD comprises one or more sgRNAs targeting exon 14 of fIL1RAP. In some embodiments, the CRISPR gene-editing system for the treatment of DDD comprising one or more sgRNAs targeting an exon of fIL1RAP is delivered via one or more lipid nanoparticles (LNPs), the LNPs comprising an LNP system described herein, e.g., and without limitation, any one of LNP systems LNP001 to LNP240.

[0512] In some embodiments, the CRISPR gene-editing system for the treatment of DDD comprises one or more sgRNAs targeting TGFBR1. In some embodiments, the CRISPR gene-editing system for the treatment of DDD comprises one or more sgRNAs targeting hTGFBR1. In some embodiments, the CRISPR gene-editing system for the treatment of DDD comprises one or more sgRNAs targeting cTGFBR1. In some embodiments, the CRISPR gene-editing system for the treatment of DDD comprises one or more sgRNAs targeting e TGFBR1. In some embodiments, the CRISPR gene-editing system for the treatment of DDD comprises one or more sgRNAs targeting fTGFBR1. In some embodiments, the CRISPR gene-editing system for the treatment of DDD comprising one or more sgRNAs targeting an exon of TGFBR1 is delivered via one or more lipid nanoparticles (LNPs), the LNPs comprising an LNP system described herein, e.g., and without limitation, any one of LNP systems LNP001 to LNP240.

[0513] In some embodiments, the CRISPR gene-editing system for the treatment of DDD comprises one or more sgRNAs targeting exon 1 of hTGFBR1. In some embodiments, the CRISPR gene-editing system for the treatment of DDD comprises one or more sgRNAs targeting exon 2 of hTGFBR1. In some embodiments, the CRISPR gene-editing system for the treatment of DDD comprises one or more sgRNAs targeting exon 3 of hTGFBR1. In some embodiments, the CRISPR gene-editing system for the treatment of DDD comprises one or more sgRNAs targeting exon 4 of hTGFBR1. In some embodiments, the CRISPR gene-editing system for the treatment of DDD comprises one or more sgRNAs targeting exon 5 of hTGFBR1. In some embodiments, the CRISPR gene-editing system for the treatment of DDD comprises one or more sgRNAs targeting exon 6 of hTGFBR1. In some embodiments, the CRISPR gene-editing system for the treatment of DDD comprises one or more sgRNAs targeting exon 7 of hTGFBR1. In some embodiments, the CRISPR gene-editing system for the treatment of DDD comprises one or more sgRNAs targeting exon 8 of hTGFBR1. In some embodiments, the CRISPR gene-editing system for the treatment of DDD comprises one or more sgRNAs targeting exon 9 of hTGFBR1. In some embodiments, the CRISPR gene-editing system for the treatment of DDD comprises one or more sgRNAs targeting exon 10 of hTGFBR1. In some embodiments, the CRISPR gene-editing system for the treatment of DDD comprises one or more sgRNAs targeting exon 11 of hTGFBR1. In some embodiments, the CRISPR gene-editing system for the treatment of DDD comprising one or more sgRNAs targeting an exon of hTGFBR1 is delivered via one or more lipid nanoparticles (LNPs), the LNPs comprising an LNP system described herein, e.g., and without limitation, any one of LNP systems LNP001 to LNP240.

[0514] In some embodiments, the CRISPR gene-editing system for the treatment of DDD comprises one or more sgRNAs targeting exon 1 of cTGFBR1. In some embodiments, the CRISPR gene-editing system for the treatment of DDD comprises one or more sgRNAs targeting exon 2 of cTGFBR1. In some embodiments, the CRISPR gene-editing system for the treatment of DDD comprises one or more sgRNAs targeting exon 3 of cTGFBR1. In some embodiments, the CRISPR gene-editing system for the treatment of DDD comprises one or more sgRNAs targeting exon 4 of cTGFBR1. In some embodiments, the CRISPR gene-editing system for the treatment of DDD comprises one or more sgRNAs targeting exon 5 of cTGFBR1. In some embodiments, the CRISPR gene-editing system for the treatment of DDD comprises one or more sgRNAs targeting exon 6 of cTGFBR1. In some embodiments, the CRISPR gene-editing system for the treatment of DDD comprises one or more sgRNAs targeting exon 7 of cTGFBR1. In some embodiments, the CRISPR gene-editing system for the treatment of DDD comprises one or more sgRNAs targeting exon 8 of cTGFBR1. In some embodiments, the CRISPR gene-editing system for the treatment of DDD comprises one or more sgRNAs targeting exon 9 of cTGFBR1. In some embodiments, the CRISPR gene-editing system for the treatment of DDD comprising one or more sgRNAs targeting an exon of cTGFBR1 is delivered via one or more lipid nanoparticles (LNPs), the LNPs comprising an LNP system described herein, e.g., and without limitation, any one of LNP systems LNP001 to LNP240.

[0515] In some embodiments, the CRISPR gene-editing system for the treatment of DDD comprises one or more sgRNAs targeting exon 1 of eTGFBR1. In some embodiments, the CRISPR gene-editing system for the treatment of DDD comprises one or more sgRNAs targeting exon 2 of eTGFBR1. In some embodiments, the CRISPR gene-editing system for the treatment of DDD comprises one or more sgRNAs targeting exon 3 of eTGFBR1. In some embodiments, the CRISPR gene-editing system for the treatment of DDD comprises one or more sgRNAs targeting exon 4 of eTGFBR1. In some embodiments, the CRISPR gene-editing system for the treatment of DDD comprises one or more sgRNAs targeting exon 5 of eTGFBR1. In some embodiments, the CRISPR gene-editing system for the treatment of DDD comprises one or more sgRNAs targeting exon 6 of eTGFBR1. In some embodiments, the CRISPR gene-editing system for the treatment of DDD comprises one or more sgRNAs targeting exon 7 of eTGFBR1. In some embodiments, the CRISPR gene-editing system for the treatment of DDD comprises one or more sgRNAs targeting exon 8 of eTGFBR1. In some embodiments, the CRISPR gene-editing system for the treatment of DDD comprises one or more sgRNAs targeting exon 9 of eTGFBR1. In some embodiments, the CRISPR gene-editing system for the treatment of DDD comprises one or more sgRNAs targeting exon 10 of eTGFBR1. In some embodiments, the CRISPR gene-editing system for the treatment of DDD comprises one or more sgRNAs targeting exon 11 of eTGFBR1. In some embodiments, the CRISPR gene-editing system for the treatment of DDD comprises one or more sgRNAs targeting exon 12 of eTGFBR1. In some embodiments, the CRISPR gene-editing system for the treatment of DDD comprising one or more sgRNAs targeting an exon of eTGFBR1 is delivered via one or more lipid nanoparticles (LNPs), the LNPs comprising an LNP system described herein, e.g., and without limitation, any one of LNP systems LNP001 to LNP240.

[0516] In some embodiments, the CRISPR gene-editing system for the treatment of DDD comprises one or more sgRNAs targeting exon 1 of fTGFBR1. In some embodiments, the CRISPR gene-editing system for the treatment of DDD comprises one or more sgRNAs targeting exon 2 of fTGFBR1. In some embodiments, the CRISPR gene-editing system for the treatment of DDD comprises one or more sgRNAs targeting exon 3 of fTGFBR1. In some embodiments, the CRISPR gene-editing system for the treatment of DDD comprises one or more sgRNAs targeting exon 4 of fTGFBR1. In some embodiments, the CRISPR gene-editing system for the treatment of DDD comprises one or more sgRNAs targeting exon 5 of fTGFBR1. In some embodiments, the CRISPR gene-editing system for the treatment of DDD comprises one or more sgRNAs targeting exon 6 of fTGFBR1. In some embodiments, the CRISPR gene-editing system for the treatment of DDD comprises one or more sgRNAs targeting exon 7 of fTGFBR1. In some embodiments, the CRISPR gene-editing system for the treatment of DDD comprises one or more sgRNAs targeting exon 8 of fTGFBR1. In some embodiments, the CRISPR gene-editing system for the treatment of DDD comprises one or more sgRNAs targeting exon 9 of fTGFBR1. In some embodiments, the CRISPR gene-editing system for the treatment of DDD comprises one or more sgRNAs targeting exon 10 of fTGFBR1. In some embodiments, the CRISPR gene-editing system for the treatment of DDD comprises one or more sgRNAs targeting exon 11 of fTGFBR1. In some embodiments, the CRISPR gene-editing system for the treatment of DDD comprising one or more sgRNAs targeting an exon of fTGFBR1 is delivered via one or more lipid nanoparticles (LNPs), the LNPs comprising an LNP system described herein, e.g., and without limitation, any one of LNP systems LNP001 to LNP240.

[0517] In some embodiments, the CRISPR gene-editing system for the treatment of DDD comprises one or more sgRNAs targeting TGFBR2. In some embodiments, the CRISPR gene-editing system for the treatment of DDD comprises one or more sgRNAs targeting hTGFBR2. In some embodiments, the CRISPR gene-editing system for the treatment of DDD comprises one or more sgRNAs targeting cTGFBR2. In some embodiments, the CRISPR gene-editing system for the treatment of DDD comprises one or more sgRNAs targeting eTGFBR2. In some embodiments, the CRISPR gene-editing system for the treatment of DDD comprises one or more sgRNAs targeting fTGFBR2. In some embodiments, the CRISPR gene-editing system for the treatment of DDD comprising one or more sgRNAs targeting an exon of TGFBR2 is delivered via one or more lipid nanoparticles (LNPs), the LNPs comprising an LNP system described herein, e.g., and without limitation, any one of LNP systems LNP001 to LNP240.

[0518] In some embodiments, the CRISPR gene-editing system for the treatment of DDD comprises one or more sgRNAs targeting exon 1 of hTGFBR2. In some embodiments, the CRISPR gene-editing system for the treatment of DDD comprises one or more sgRNAs targeting exon 2 of hTGFBR2. In some embodiments, the CRISPR gene-editing system for the treatment of DDD comprises one or more sgRNAs targeting exon 3 of hTGFBR2. In some embodiments, the CRISPR gene-editing system for the treatment of DDD comprises one or more sgRNAs targeting exon 4 of hTGFBR2. In some embodiments, the CRISPR gene-editing system for the treatment of DDD comprises one or more sgRNAs targeting exon 5 of hTGFBR2. In some embodiments, the CRISPR gene-editing system for the treatment of DDD comprises one or more sgRNAs targeting exon 6 of hTGFBR2. In some embodiments, the CRISPR gene-editing system for the treatment of DDD comprises one or more sgRNAs targeting exon 7 of hTGFBR2. In some embodiments, the CRISPR gene-editing system for the treatment of DDD comprises one or more sgRNAs targeting exon 8 of hTGFBR2. In some embodiments, the CRISPR gene-editing system for the treatment of DDD comprises one or more sgRNAs targeting exon 9 of hTGFBR2. In some embodiments, the CRISPR gene-editing system for the treatment of DDD comprising one or more sgRNAs targeting an exon of hTGFBR2 is delivered via one or more lipid nanoparticles (LNPs), the LNPs comprising an LNP system described herein, e.g., and without limitation, any one of LNP systems LNP001 to LNP240.

[0519] In some embodiments, the CRISPR gene-editing system for the treatment of DDD comprises one or more sgRNAs targeting exon 1 of cTGFBR2. In some embodiments, the CRISPR gene-editing system for the treatment of DDD comprises one or more sgRNAs targeting exon 2 of cTGFBR2. In some embodiments, the CRISPR gene-editing system for the treatment of DDD comprises one or more sgRNAs targeting exon 3 of cTGFBR2. In some embodiments, the CRISPR gene-editing system for the treatment of DDD comprises one or more sgRNAs targeting exon 4 of cTGFBR2. In some embodiments, the CRISPR gene-editing system for the treatment of DDD comprises one or more sgRNAs targeting exon 5 of cTGFBR2. In some embodiments, the CRISPR gene-editing system for the treatment of DDD comprises one or more sgRNAs targeting exon 6 of cTGFBR2. In some embodiments, the CRISPR gene-editing system for the treatment of DDD comprises one or more sgRNAs targeting exon 7 of cTGFBR2. In some embodiments, the CRISPR gene-editing system for the treatment of DDD comprises one or more sgRNAs targeting exon 8 of cTGFBR2. In some embodiments, the CRISPR gene-editing system for the treatment of DDD comprising one or more sgRNAs targeting an exon of cTGFBR2 is delivered via one or more lipid nanoparticles (LNPs), the LNPs comprising an LNP system described herein, e.g., and without limitation, any one of LNP systems LNP001 to LNP240.

[0520] In some embodiments, the CRISPR gene-editing system for the treatment of DDD comprises one or more sgRNAs targeting exon 1 of eTGFBR2. In some embodiments, the CRISPR gene-editing system for the treatment of DDD comprises one or more sgRNAs targeting exon 2 of eTGFBR2. In some embodiments, the CRISPR gene-editing system for the treatment of DDD comprises one or more sgRNAs targeting exon 3 of eTGFBR2. In some embodiments, the CRISPR gene-editing system for the treatment of DDD comprises one or more sgRNAs targeting exon 4 of eTGFBR2. In some embodiments, the CRISPR gene-editing system for the treatment of DDD comprises one or more sgRNAs targeting exon 5 of eTGFBR2. In some embodiments, the CRISPR gene-editing system for the treatment of DDD comprises one or more sgRNAs targeting exon 6 of eTGFBR2. In some embodiments, the CRISPR gene-editing system for the treatment of DDD comprises one or more sgRNAs targeting exon 7 of eTGFBR2. In some embodiments, the CRISPR gene-editing system for the treatment of DDD comprises one or more sgRNAs targeting exon 8 of eTGFBR2. In some embodiments, the CRISPR gene-editing system for the treatment of DDD comprises one or more sgRNAs targeting exon 9 of eTGFBR2. In some embodiments, the CRISPR gene-editing system for the treatment of DDD comprises one or more sgRNAs targeting exon 10 of eTGFBR2. In some embodiments, the CRISPR gene-editing system for the treatment of DDD comprising one or more sgRNAs targeting an exon of eTGFBR2 is delivered via one or more lipid nanoparticles (LNPs), the LNPs comprising an LNP system described herein, e.g., and without limitation, any one of LNP systems LNP001 to LNP240.

[0521] In some embodiments, the CRISPR gene-editing system for the treatment of DDD comprises one or more sgRNAs targeting exon 1 of fTGFBR2. In some embodiments, the CRISPR gene-editing system for the treatment of DDD comprises one or more sgRNAs targeting exon 2 of fTGFBR2. In some embodiments, the CRISPR gene-editing system for the treatment of DDD comprises one or more sgRNAs targeting exon 3 of fTGFBR2. In some embodiments, the CRISPR gene-editing system for the treatment of DDD comprises one or more sgRNAs targeting exon 4 of fTGFBR2. In some embodiments, the CRISPR gene-editing system for the treatment of DDD comprises one or more sgRNAs targeting exon 5 of fTGFBR2. In some embodiments, the CRISPR gene-editing system for the treatment of DDD comprises one or more sgRNAs targeting exon 6 of fTGFBR2. In some embodiments, the CRISPR gene-editing system for the treatment of DDD comprises one or more sgRNAs targeting exon 7 of fTGFBR2. In some embodiments, the CRISPR gene-editing system for the treatment of DDD comprises one or more sgRNAs targeting exon 8 of fTGFBR2. In some embodiments, the CRISPR gene-editing system for the treatment of DDD comprising one or more sgRNAs targeting an exon of fTGFBR2 is delivered via one or more lipid nanoparticles (LNPs), the LNPs comprising an LNP system described herein, e.g., and without limitation, any one of LNP systems LNP001 to LNP240.

[0522] In some embodiments, the CRISPR gene-editing system for the treatment of DDD comprises one or more sgRNAs targeting IL6R. In some embodiments, the CRISPR gene-editing system for the treatment of DDD comprises one or more sgRNAs targeting hIL6R. In some embodiments, the CRISPR gene-editing system for the treatment of DDD comprises one or more sgRNAs targeting cIL6R. In some embodiments, the CRISPR gene-editing system for the treatment of DDD comprises one or more sgRNAs targeting eIL6R. In some embodiments, the CRISPR gene-editing system for the treatment of DDD comprises one or more sgRNAs targeting fIL6R. In some embodiments, the CRISPR gene-editing system for the treatment of DDD comprising one or more sgRNAs targeting an exon of IL6R is delivered via one or more lipid nanoparticles (LNPs), the LNPs comprising an LNP system described herein, e.g., and without limitation, any one of LNP systems LNP001 to LNP240.

[0523] In some embodiments, the CRISPR gene-editing system for the treatment of DDD comprises one or more sgRNAs targeting exon 1 of hIL6R. In some embodiments, the CRISPR gene-editing system for the treatment of DDD comprises one or more sgRNAs targeting exon 2 of hIL6R. In some embodiments, the CRISPR gene-editing system for the treatment of DDD comprises one or more sgRNAs targeting exon 3 of hIL6R. In some embodiments, the CRISPR gene-editing system for the treatment of DDD comprises one or more sgRNAs targeting exon 4 of hIL6R. In some embodiments, the CRISPR gene-editing system for the treatment of DDD comprises one or more sgRNAs targeting exon 5 of hIL6R. In some embodiments, the CRISPR gene-editing system for the treatment of DDD comprises one or more sgRNAs targeting exon 6 of hIL6R. In some embodiments, the CRISPR gene-editing system for the treatment of DDD comprises one or more sgRNAs targeting exon 7 of hIL6R. In some embodiments, the CRISPR gene-editing system for the treatment of DDD comprises one or more sgRNAs targeting exon 8 of hIL6R. In some embodiments, the CRISPR gene-editing system for the treatment of DDD comprises one or more sgRNAs targeting exon 9 of hIL6R. In some embodiments, the CRISPR gene-editing system for the treatment of DDD comprises one or more sgRNAs targeting exon 10 of hIL6R. In some embodiments, the CRISPR gene-editing system for the treatment of DDD comprises one or more sgRNAs targeting exon 11 of hIL6R In some embodiments, the CRISPR gene-editing system for the treatment of DDD comprises one or more sgRNAs targeting exon 12 of hIL6R. In some embodiments, the CRISPR gene-editing system for the treatment of DDD comprises one or more sgRNAs targeting exon 13 of hIL6R. In some embodiments, the CRISPR gene-editing system for the treatment of DDD comprises one or more sgRNAs targeting exon 14 of hIL6R. In some embodiments, the CRISPR gene-editing system for the treatment of DDD comprises one or more sgRNAs targeting exon 15 of hIL6R. In some embodiments, the CRISPR gene-editing system for the treatment of DDD comprising one or more sgRNAs targeting an exon of hIL6R is delivered via one or more lipid nanoparticles (LNPs), the LNPs comprising an LNP system described herein, e.g., and without limitation, any one of LNP systems LNP001 to LNP240.

[0524] In some embodiments, the CRISPR gene-editing system for the treatment of DDD comprises one or more sgRNAs targeting exon 1 of cIL6R. In some embodiments, the CRISPR gene-editing system for the treatment of DDD comprises one or more sgRNAs targeting exon 2 of cIL6R. In some embodiments, the CRISPR gene-editing system for the treatment of DDD comprises one or more sgRNAs targeting exon 3 of cIL6R. In some embodiments, the CRISPR gene-editing system for the treatment of DDD comprises one or more sgRNAs targeting exon 4 of cIL6R. In some embodiments, the CRISPR gene-editing system for the treatment of DDD comprises one or more sgRNAs targeting exon 5 of cIL6R. In some embodiments, the CRISPR gene-editing system for the treatment of DDD comprises one or more sgRNAs targeting exon 6 of cIL6R. In some embodiments, the CRISPR gene-editing system for the treatment of DDD comprises one or more sgRNAs targeting exon 7 of cIL6R. In some embodiments, the CRISPR gene-editing system for the treatment of DDD comprises one or more sgRNAs targeting exon 8 of cIL6R. In some embodiments, the CRISPR gene-editing system for the treatment of DDD comprises one or more sgRNAs targeting exon 9 of cIL6R. In some embodiments, the CRISPR gene-editing system for the treatment of DDD comprises one or more sgRNAs targeting exon 10 of cIL6R. In some embodiments, the CRISPR gene-editing system for the treatment of DDD comprises one or more sgRNAs targeting exon 11 of cIL6R. In some embodiments, the CRISPR gene-editing system for the treatment of DDD comprises one or more sgRNAs targeting exon 12 of cIL6R. In some embodiments, the CRISPR gene-editing system for the treatment of DDD comprises one or more sgRNAs targeting exon 13 of cIL6R. In some embodiments, the CRISPR gene-editing system for the treatment of DDD comprising one or more sgRNAs targeting an exon of cIL6R is delivered via one or more lipid nanoparticles (LNPs), the LNPs comprising an LNP system described herein, e.g., and without limitation, any one of LNP systems LNP001 to LNP240.

[0525] In some embodiments, the CRISPR gene-editing system for the treatment of DDD comprises one or more sgRNAs targeting exon 1 of eIL6R. In some embodiments, the CRISPR gene-editing system for the treatment of DDD comprises one or more sgRNAs targeting exon 2 of eIL6R. In some embodiments, the CRISPR gene-editing system for the treatment of DDD comprises one or more sgRNAs targeting exon 3 of eIL6R. In some embodiments, the CRISPR gene-editing system for the treatment of DDD comprises one or more sgRNAs targeting exon 4 of eIL6R. In some embodiments, the CRISPR gene-editing system for the treatment of DDD comprises one or more sgRNAs targeting exon 5 of eIL6R. In some embodiments, the CRISPR gene-editing system for the treatment of DDD comprises one or more sgRNAs targeting exon 6 of eIL6R. In some embodiments, the CRISPR gene-editing system for the treatment of DDD comprises one or more sgRNAs targeting exon 7 of eIL6R. In some embodiments, the CRISPR gene-editing system for the treatment of DDD comprises one or more sgRNAs targeting exon 8 of eIL6R. In some embodiments, the CRISPR gene-editing system for the treatment of DDD comprises one or more sgRNAs targeting exon 9 of eIL6R. In some embodiments, the CRISPR gene-editing system for the treatment of DDD comprises one or more sgRNAs targeting exon 10 of eIL6R. In some embodiments, the CRISPR gene-editing system for the treatment of DDD comprises one or more sgRNAs targeting exon 11 of eIL6R. In some embodiments, the CRISPR gene-editing system for the treatment of DDD comprising one or more sgRNAs targeting an exon of eIL6R is delivered via one or more lipid nanoparticles (LNPs), the LNPs comprising an LNP system described herein, e.g., and without limitation, any one of LNP systems LNP001 to LNP240.

[0526] In some embodiments, the CRISPR gene-editing system for the treatment of DDD comprises one or more sgRNAs targeting exon 1 of fIL6R. In some embodiments, the CRISPR gene-editing system for the treatment of DDD comprises one or more sgRNAs targeting exon 2 of fIL6R. In some embodiments, the CRISPR gene-editing system for the treatment of DDD comprises one or more sgRNAs targeting exon 3 of fIL6R. In some embodiments, the CRISPR gene-editing system for the treatment of DDD comprises one or more sgRNAs targeting exon 4 of fIL6R. In some embodiments, the CRISPR gene-editing system for the treatment of DDD comprises one or more sgRNAs targeting exon 5 of fIL6R. In some embodiments, the CRISPR gene-editing system for the treatment of DDD comprises one or more sgRNAs targeting exon 6 of fIL6R. In some embodiments, the CRISPR gene-editing system for the treatment of DDD comprises one or more sgRNAs targeting exon 7 of fIL6R. In some embodiments, the CRISPR gene-editing system for the treatment of DDD comprises one or more sgRNAs targeting exon 8 of fIL6R. In some embodiments, the CRISPR gene-editing system for the treatment of DDD comprises one or more sgRNAs targeting exon 9 of fIL6R. In some embodiments, the CRISPR gene-editing system for the treatment of DDD comprises one or more sgRNAs targeting exon 10 of fIL6R. In some embodiments, the CRISPR gene-editing system for the treatment of DDD comprising one or more sgRNAs targeting an exon of fIL6R is delivered via one or more lipid nanoparticles (LNPs), the LNPs comprising an LNP system described herein, e.g., and without limitation, any one of LNP systems LNP001 to LNP240.

[0527] In some embodiments, the CRISPR gene-editing system for the treatment of DDD comprises one or more sgRNAs targeting IL6ST. In some embodiments, the CRISPR gene-editing system for the treatment of DDD comprises one or more sgRNAs targeting hIL6ST. In some embodiments, the CRISPR gene-editing system for the treatment of DDD comprises one or more sgRNAs targeting cIL6ST. In some embodiments, the CRISPR gene-editing system for the treatment of DDD comprises one or more sgRNAs targeting eIL6ST. In some embodiments, the CRISPR gene-editing system for the treatment of DDD comprises one or more sgRNAs targeting fIL6ST. In some embodiments, the CRISPR gene-editing system for the treatment of DDD comprising one or more sgRNAs targeting an exon of IL6ST is delivered via one or more lipid nanoparticles (LNPs), the LNPs comprising an LNP system described herein, e.g., and without limitation, any one of LNP systems LNP001 to LNP240.

[0528] In some embodiments, the CRISPR gene-editing system for the treatment of DDD comprises one or more sgRNAs targeting exon 1 of hIL6ST. In some embodiments, the CRISPR gene-editing system for the treatment of DDD comprises one or more sgRNAs targeting exon 2 of hIL6ST. In some embodiments, the CRISPR gene-editing system for the treatment of DDD comprises one or more sgRNAs targeting exon 3 of hIL6ST. In some embodiments, the CRISPR gene-editing system for the treatment of DDD comprises one or more sgRNAs targeting exon 4 of hIL6ST. In some embodiments, the CRISPR gene-editing system for the treatment of DDD comprises one or more sgRNAs targeting exon 5 of hIL6ST. In some embodiments, the CRISPR gene-editing system for the treatment of DDD comprises one or more sgRNAs targeting exon 6 of hIL6ST. In some embodiments, the CRISPR gene-editing system for the treatment of DDD comprises one or more sgRNAs targeting exon 7 of hIL6ST. In some embodiments, the CRISPR gene-editing system for the treatment of DDD comprises one or more sgRNAs targeting exon 8 of hIL6ST. In some embodiments, the CRISPR gene-editing system for the treatment of DDD comprises one or more sgRNAs targeting exon 9 of hIL6ST. In some embodiments, the CRISPR gene-editing system for the treatment of DDD comprises one or more sgRNAs targeting exon 10 of hIL6ST. In some embodiments, the CRISPR gene-editing system for the treatment of DDD comprises one or more sgRNAs targeting exon 11 of hIL6ST. In some embodiments, the CRISPR gene-editing system for the treatment of DDD comprises one or more sgRNAs targeting exon 12 of hIL6ST. In some embodiments, the CRISPR gene-editing system for the treatment of DDD comprises one or more sgRNAs targeting exon 13 of hIL6ST. In some embodiments, the CRISPR gene-editing system for the treatment of DDD comprises one or more sgRNAs targeting exon 14 of hIL6ST. In some embodiments, the CRISPR gene-editing system for the treatment of DDD comprises one or more sgRNAs targeting exon 15 of hIL6ST. In some embodiments, the CRISPR gene-editing system for the treatment of DDD comprises one or more sgRNAs targeting exon 16 of hIL6ST. In some embodiments, the CRISPR gene-editing system for the treatment of DDD comprises one or more sgRNAs targeting exon 17 of hIL6ST. In some embodiments, the CRISPR gene-editing system for the treatment of DDD comprises one or more sgRNAs targeting exon 18 of hIL6ST. In some embodiments, the CRISPR gene-editing system for the treatment of DDD comprises one or more sgRNAs targeting exon 19 of hIL6ST. In some embodiments, the CRISPR gene-editing system for the treatment of DDD comprising one or more sgRNAs targeting an exon of hIL6ST is delivered via one or more lipid nanoparticles (LNPs), the LNPs comprising an LNP system described herein, e.g., and without limitation, any one of LNP systems LNP001 to LNP240.

[0529] In some embodiments, the CRISPR gene-editing system for the treatment of DDD comprises one or more sgRNAs targeting exon 1 of cIL6ST. In some embodiments, the CRISPR gene-editing system for the treatment of DDD comprises one or more sgRNAs targeting exon 2 of cIL6ST. In some embodiments, the CRISPR gene-editing system for the treatment of DDD comprises one or more sgRNAs targeting exon 3 of cIL6ST. In some embodiments, the CRISPR gene-editing system for the treatment of DDD comprises one or more sgRNAs targeting exon 4 of cIL6ST. In some embodiments, the CRISPR gene-editing system for the treatment of DDD comprises one or more sgRNAs targeting exon 5 of cIL6ST. In some embodiments, the CRISPR gene-editing system for the treatment of DDD comprises one or more sgRNAs targeting exon 6 of cIL6ST. In some embodiments, the CRISPR gene-editing system for the treatment of DDD comprises one or more sgRNAs targeting exon 7 of cIL6ST. In some embodiments, the CRISPR gene-editing system for the treatment of DDD comprises one or more sgRNAs targeting exon 8 of cIL6ST. In some embodiments, the CRISPR gene-editing system for the treatment of DDD comprises one or more sgRNAs targeting exon 9 of cIL6ST. In some embodiments, the CRISPR gene-editing system for the treatment of DDD comprises one or more sgRNAs targeting exon 10 of cIL6ST. In some embodiments, the CRISPR gene-editing system for the treatment of DDD comprises one or more sgRNAs targeting exon 11 of cIL6ST In some embodiments, the CRISPR gene-editing system for the treatment of DDD comprises one or more sgRNAs targeting exon 12 of cIL6ST. In some embodiments, the CRISPR gene-editing system for the treatment of DDD comprises one or more sgRNAs targeting exon 13 of cIL6ST. In some embodiments, the CRISPR gene-editing system for the treatment of DDD comprises one or more sgRNAs targeting exon 14 of cIL6ST. In some embodiments, the CRISPR gene-editing system for the treatment of DDD comprises one or more sgRNAs targeting exon 15 of cIL6ST. In some embodiments, the CRISPR gene-editing system for the treatment of DDD comprises one or more sgRNAs targeting exon 16 of cIL6ST. In some embodiments, the CRISPR gene-editing system for the treatment of DDD comprises one or more sgRNAs targeting exon 17 of cIL6ST. In some embodiments, the CRISPR gene-editing system for the treatment of DDD comprises one or more sgRNAs targeting exon 18 of cIL6ST. In some embodiments, the CRISPR gene-editing system for the treatment of DDD comprising one or more sgRNAs targeting an exon of cIL6ST is delivered via one or more lipid nanoparticles (LNPs), the LNPs comprising an LNP system described herein, e.g., and without limitation, any one of LNP systems LNP001 to LNP240.

[0530] In some embodiments, the CRISPR gene-editing system for the treatment of DDD comprises one or more sgRNAs targeting exon 1 of eIL6ST. In some embodiments, the CRISPR gene-editing system for the treatment of DDD comprises one or more sgRNAs targeting exon 2 of eIL6ST. In some embodiments, the CRISPR gene-editing system for the treatment of DDD comprises one or more sgRNAs targeting exon 3 of eIL6ST. In some embodiments, the CRISPR gene-editing system for the treatment of DDD comprises one or more sgRNAs targeting exon 4 of eIL6ST. In some embodiments, the CRISPR gene-editing system for the treatment of DDD comprises one or more sgRNAs targeting exon 5 of eIL6ST. In some embodiments, the CRISPR gene-editing system for the treatment of DDD comprises one or more sgRNAs targeting exon 6 of eIL6ST. In some embodiments, the CRISPR gene-editing system for the treatment of DDD comprises one or more sgRNAs targeting exon 7 of eIL6ST. In some embodiments, the CRISPR gene-editing system for the treatment of DDD comprises one or more sgRNAs targeting exon 8 of eIL6ST. In some embodiments, the CRISPR gene-editing system for the treatment of DDD comprises one or more sgRNAs targeting exon 9 of eIL6ST. In some embodiments, the CRISPR gene-editing system for the treatment of DDD comprises one or more sgRNAs targeting exon 10 of eIL6ST. In some embodiments, the CRISPR gene-editing system for the treatment of DDD comprises one or more sgRNAs targeting exon 11 of eIL6ST In some embodiments, the CRISPR gene-editing system for the treatment of DDD comprises one or more sgRNAs targeting exon 12 of eIL6ST. In some embodiments, the CRISPR gene-editing system for the treatment of DDD comprises one or more sgRNAs targeting exon 13 of eIL6ST. In some embodiments, the CRISPR gene-editing system for the treatment of DDD comprises one or more sgRNAs targeting exon 14 of eIL6ST. In some embodiments, the CRISPR gene-editing system for the treatment of DDD comprises one or more sgRNAs targeting exon 15 of eIL6ST. In some embodiments, the CRISPR gene-editing system for the treatment of DDD comprises one or more sgRNAs targeting exon 16 of eIL6ST. In some embodiments, the CRISPR gene-editing system for the treatment of DDD comprises one or more sgRNAs targeting exon 17 of eIL6ST. In some embodiments, the CRISPR gene-editing system for the treatment of DDD comprises one or more sgRNAs targeting exon 18 of eIL6ST. In some embodiments, the CRISPR gene-editing system for the treatment of DDD comprising one or more sgRNAs targeting an exon of eIL6ST is delivered via one or more lipid nanoparticles (LNPs), the LNPs comprising an LNP system described herein, e.g., and without limitation, any one of LNP systems LNP001 to LNP240.

[0531] In some embodiments, the CRISPR gene-editing system for the treatment of DDD comprises one or more sgRNAs targeting exon 1 of fIL6ST. In some embodiments, the CRISPR gene-editing system for the treatment of DDD comprises one or more sgRNAs targeting exon 2 of fIL6ST. In some embodiments, the CRISPR gene-editing system for the treatment of DDD comprises one or more sgRNAs targeting exon 3 of fIL6ST. In some embodiments, the CRISPR gene-editing system for the treatment of DDD comprises one or more sgRNAs targeting exon 4 of fIL6ST. In some embodiments, the CRISPR gene-editing system for the treatment of DDD comprises one or more sgRNAs targeting exon 5 of fIL6ST. In some embodiments, the CRISPR gene-editing system for the treatment of DDD comprises one or more sgRNAs targeting exon 6 of fIL6ST. In some embodiments, the CRISPR gene-editing system for the treatment of DDD comprises one or more sgRNAs targeting exon 7 of fIL6ST. In some embodiments, the CRISPR gene-editing system for the treatment of DDD comprises one or more sgRNAs targeting exon 8 of fIL6ST. In some embodiments, the CRISPR gene-editing system for the treatment of DDD comprises one or more sgRNAs targeting exon 9 of fIL6ST. In some embodiments, the CRISPR gene-editing system for the treatment of DDD comprises one or more sgRNAs targeting exon 10 of fIL6ST. In some embodiments, the CRISPR gene-editing system for the treatment of DDD comprises one or more sgRNAs targeting exon 11 of fIL6ST In some embodiments, the CRISPR gene-editing system for the treatment of DDD comprises one or more sgRNAs targeting exon 12 of fIL6ST. In some embodiments, the CRISPR gene-editing system for the treatment of DDD comprises one or more sgRNAs targeting exon 13 of fIL6ST. In some embodiments, the CRISPR gene-editing system for the treatment of DDD comprises one or more sgRNAs targeting exon 14 of fIL6ST. In some embodiments, the CRISPR gene-editing system for the treatment of DDD comprises one or more sgRNAs targeting exon 15 of fIL6ST. In some embodiments, the CRISPR gene-editing system for the treatment of DDD comprises one or more sgRNAs targeting exon 16 of fIL6ST. In some embodiments, the CRISPR gene-editing system for the treatment of DDD comprises one or more sgRNAs targeting exon 17 of fIL6ST. In some embodiments, the CRISPR gene-editing system for the treatment of DDD comprises one or more sgRNAs targeting exon 18 of fIL6ST. In some embodiments, the CRISPR gene-editing system for the treatment of DDD comprises one or more sgRNAs targeting exon 19 of fIL6ST. In some embodiments, the CRISPR gene-editing system for the treatment of DDD comprises one or more sgRNAs targeting exon 20 of fIL6ST. In some embodiments, the CRISPR gene-editing system for the treatment of DDD comprising one or more sgRNAs targeting an exon of fIL6ST is delivered via one or more lipid nanoparticles (LNPs), the LNPs comprising an LNP system described herein, e.g., and without limitation, any one of LNP systems LNP001 to LNP240.

[0532] In some embodiments, the CRISPR gene-editing system for the treatment of DDD comprises one or more sgRNAs targeting TNFRSF1A. In some embodiments, the CRISPR gene-editing system for the treatment of DDD comprises one or more sgRNAs targeting hTNFRSF1A. In some embodiments, the CRISPR gene-editing system for the treatment of DDD comprises one or more sgRNAs targeting cTNFRSF1A. In some embodiments, the CRISPR gene-editing system for the treatment of DDD comprises one or more sgRNAs targeting eTNFRSF1A. In some embodiments, the CRISPR gene-editing system for the treatment of DDD comprises one or more sgRNAs targeting fTNFRSF1A. In some embodiments, the CRISPR gene-editing system for the treatment of DDD comprising one or more sgRNAs targeting an exon of TNFRSF1A is delivered via one or more lipid nanoparticles (LNPs), the LNPs comprising an LNP system described herein, e.g., and without limitation, any one of LNP systems LNP001 to LNP240.

[0533] In some embodiments, the CRISPR gene-editing system for the treatment of DDD comprises one or more sgRNAs targeting exon 1 of hTNFRSF1A. In some embodiments, the CRISPR gene-editing system for the treatment of DDD comprises one or more sgRNAs targeting exon 2 of hTNFRSF1A. In some embodiments, the CRISPR gene-editing system for the treatment of DDD comprises one or more sgRNAs targeting exon 3 of hTNFRSF1A. In some embodiments, the CRISPR gene-editing system for the treatment of DDD comprises one or more sgRNAs targeting exon 4 of hTNFRSF1A. In some embodiments, the CRISPR gene-editing system for the treatment of DDD comprises one or more sgRNAs targeting exon 5 of hTNFRSF1A. In some embodiments, the CRISPR gene-editing system for the treatment of DDD comprises one or more sgRNAs targeting exon 6 of hTNFRSF1A. In some embodiments, the CRISPR gene-editing system for the treatment of DDD comprises one or more sgRNAs targeting exon 7 of hTNFRSF1A. In some embodiments, the CRISPR gene-editing system for the treatment of DDD comprises one or more sgRNAs targeting exon 8 of hTNFRSF1A. In some embodiments, the CRISPR gene-editing system for the treatment of DDD comprises one or more sgRNAs targeting exon 9 of hTNFRSF1A. In some embodiments, the CRISPR gene-editing system for the treatment of DDD comprises one or more sgRNAs targeting exon 10 of hTNFRSF1A. In some embodiments, the CRISPR gene-editing system for the treatment of DDD comprises one or more sgRNAs targeting exon 11 of hTNFRSF1A. In some embodiments, the CRISPR gene-editing system for the treatment of DDD comprising one or more sgRNAs targeting an exon of hTNFRSF1A is delivered via one or more lipid nanoparticles (LNPs), the LNPs comprising an LNP system described herein, e.g., and without limitation, any one of LNP systems LNP001 to LNP240.

[0534] In some embodiments, the CRISPR gene-editing system for the treatment of DDD comprises one or more sgRNAs targeting exon 1 of cTNFRSF1A. In some embodiments, the CRISPR gene-editing system for the treatment of DDD comprises one or more sgRNAs targeting exon 2 of cTNFRSF1A. In some embodiments, the CRISPR gene-editing system for the treatment of DDD comprises one or more sgRNAs targeting exon 3 of cTNFRSF1A. In some embodiments, the CRISPR gene-editing system for the treatment of DDD comprises one or more sgRNAs targeting exon 4 of cTNFRSF1A. In some embodiments, the CRISPR gene-editing system for the treatment of DDD comprises one or more sgRNAs targeting exon 5 of cTNFRSF1A. In some embodiments, the CRISPR gene-editing system for the treatment of DDD comprises one or more sgRNAs targeting exon 6 of cTNFRSF1A. In some embodiments, the CRISPR gene-editing system for the treatment of DDD comprises one or more sgRNAs targeting exon 7 of cTNFRSF1A. In some embodiments, the CRISPR gene-editing system for the treatment of DDD comprises one or more sgRNAs targeting exon 8 of cTNFRSF1A. In some embodiments, the CRISPR gene-editing system for the treatment of DDD comprises one or more sgRNAs targeting exon 9 of cTNFRSF1A. In some embodiments, the CRISPR gene-editing system for the treatment of DDD comprises one or more sgRNAs targeting exon 10 of cTNFRSF1A. In some embodiments, the CRISPR gene-editing system for the treatment of DDD comprises one or more sgRNAs targeting exon 11 of cTNFRSF1A. In some embodiments, the CRISPR gene-editing system for the treatment of DDD comprising one or more sgRNAs targeting an exon of cTNFRSF1A is delivered via one or more lipid nanoparticles (LNPs), the LNPs comprising an LNP system described herein, e.g., and without limitation, any one of LNP systems LNP001 to LNP240.

[0535] In some embodiments, the CRISPR gene-editing system for the treatment of DDD comprises one or more sgRNAs targeting exon 1 of eTNFRSF1A. In some embodiments, the CRISPR gene-editing system for the treatment of DDD comprises one or more sgRNAs targeting exon 2 of eTNFRSF1A. In some embodiments, the CRISPR gene-editing system for the treatment of DDD comprises one or more sgRNAs targeting exon 3 of eTNFRSF1A. In some embodiments, the CRISPR gene-editing system for the treatment of DDD comprises one or more sgRNAs targeting exon 4 of eTNFRSF1A. In some embodiments, the CRISPR gene-editing system for the treatment of DDD comprises one or more sgRNAs targeting exon 5 of eTNFRSF1A. In some embodiments, the CRISPR gene-editing system for the treatment of DDD comprises one or more sgRNAs targeting exon 6 of eTNFRSF1A. In some embodiments, the CRISPR gene-editing system for the treatment of DDD comprises one or more sgRNAs targeting exon 7 of eTNFRSF1A. In some embodiments, the CRISPR gene-editing system for the treatment of DDD comprises one or more sgRNAs targeting exon 8 of eTNFRSF1A. In some embodiments, the CRISPR gene-editing system for the treatment of DDD comprises one or more sgRNAs targeting exon 9 of eTNFRSF1A. In some embodiments, the CRISPR gene-editing system for the treatment of DDD comprises one or more sgRNAs targeting exon 10 of eTNFRSF1A. In some embodiments, the CRISPR gene-editing system for the treatment of DDD comprising one or more sgRNAs targeting an exon of eTNFRSF1A is delivered via one or more lipid nanoparticles (LNPs), the LNPs comprising an LNP system described herein, e.g., and without limitation, any one of LNP systems LNP001 to LNP240.

[0536] In some embodiments, the CRISPR gene-editing system for the treatment of DDD comprises one or more sgRNAs targeting exon 1 of fTNFRSF1A. In some embodiments, the CRISPR gene-editing system for the treatment of DDD comprises one or more sgRNAs targeting exon 2 of fTNFRSF1A. In some embodiments, the CRISPR gene-editing system for the treatment of DDD comprises one or more sgRNAs targeting exon 3 of fTNFRSF1A. In some embodiments, the CRISPR gene-editing system for the treatment of DDD comprises one or more sgRNAs targeting exon 4 of fTNFRSF1A. In some embodiments, the CRISPR gene-editing system for the treatment of DDD comprises one or more sgRNAs targeting exon 5 of fTNFRSF1A. In some embodiments, the CRISPR gene-editing system for the treatment of DDD comprises one or more sgRNAs targeting exon 6 of fTNFRSF1A. In some embodiments, the CRISPR gene-editing system for the treatment of DDD comprises one or more sgRNAs targeting exon 7 of fTNFRSF1A. In some embodiments, the CRISPR gene-editing system for the treatment of DDD comprises one or more sgRNAs targeting exon 8 of fTNFRSF1A. In some embodiments, the CRISPR gene-editing system for the treatment of DDD comprises one or more sgRNAs targeting exon 9 of fTNFRSF1A. In some embodiments, the CRISPR gene-editing system for the treatment of DDD comprises one or more sgRNAs targeting exon 10 of fTNFRSF1A. In some embodiments, the CRISPR gene-editing system for the treatment of DDD comprising one or more sgRNAs targeting an exon of fTNFRSF1A is delivered via one or more lipid nanoparticles (LNPs), the LNPs comprising an LNP system described herein, e.g., and without limitation, any one of LNP systems LNP001 to LNP240.

[0537] In some embodiments, the CRISPR gene-editing system for the treatment of DDD comprises one or more sgRNAs targeting TNFRSF1B. In some embodiments, the CRISPR gene-editing system for the treatment of DDD comprises one or more sgRNAs targeting hTNFRSF1B. In some embodiments, the CRISPR gene-editing system for the treatment of DDD comprises one or more sgRNAs targeting cTNFRSF1B. In some embodiments, the CRISPR gene-editing system for the treatment of DDD comprises one or more sgRNAs targeting eTNFRSF1B. In some embodiments, the CRISPR gene-editing system for the treatment of DDD comprises one or more sgRNAs targeting fTNFRSF1B. In some embodiments, the CRISPR gene-editing system for the treatment of DDD comprising one or more sgRNAs targeting an exon of TNFRSF1B is delivered via one or more lipid nanoparticles (LNPs), the LNPs comprising an LNP system described herein, e.g., and without limitation, any one of LNP systems LNP001 to LNP240.

[0538] In some embodiments, the CRISPR gene-editing system for the treatment of DDD comprises one or more sgRNAs targeting exon 1 of hTNFRSF1B. In some embodiments, the CRISPR gene-editing system for the treatment of DDD comprises one or more sgRNAs targeting exon 2 of hTNFRSF1B. In some embodiments, the CRISPR gene-editing system for the treatment of DDD comprises one or more sgRNAs targeting exon 3 of hTNFRSF1B. In some embodiments, the CRISPR gene-editing system for the treatment of DDD comprises one or more sgRNAs targeting exon 4 of hTNFRSF1B. In some embodiments, the CRISPR gene-editing system for the treatment of DDD comprises one or more sgRNAs targeting exon 5 of hTNFRSF1B. In some embodiments, the CRISPR gene-editing system for the treatment of DDD comprises one or more sgRNAs targeting exon 6 of hTNFRSF1B. In some embodiments, the CRISPR gene-editing system for the treatment of DDD comprises one or more sgRNAs targeting exon 7 of hTNFRSF1B. In some embodiments, the CRISPR gene-editing system for the treatment of DDD comprises one or more sgRNAs targeting exon 8 of hTNFRSF1B. In some embodiments, the CRISPR gene-editing system for the treatment of DDD comprises one or more sgRNAs targeting exon 9 of hTNFRSF1B. In some embodiments, the CRISPR gene-editing system for the treatment of DDD comprises one or more sgRNAs targeting exon 10 of hTNFRSF1B. In some embodiments, the CRISPR gene-editing system for the treatment of DDD comprises one or more sgRNAs targeting exon 11 of hTNFRSF1B In some embodiments, the CRISPR gene-editing system for the treatment of DDD comprises one or more sgRNAs targeting exon 12 of hTNFRSF1B. In some embodiments, the CRISPR gene-editing system for the treatment of DDD comprises one or more sgRNAs targeting exon 13 of hTNFRSF1B. In some embodiments, the CRISPR gene-editing system for the treatment of DDD comprising one or more sgRNAs targeting an exon of hTNFRSF1B is delivered via one or more lipid nanoparticles (LNPs), the LNPs comprising an LNP system described herein, e.g., and without limitation, any one of LNP systems LNP001 to LNP240.

[0539] In some embodiments, the CRISPR gene-editing system for the treatment of DDD comprises one or more sgRNAs targeting exon 1 of cTNFRSF1B. In some embodiments, the CRISPR gene-editing system for the treatment of DDD comprises one or more sgRNAs targeting exon 2 of cTNFRSF1B. In some embodiments, the CRISPR gene-editing system for the treatment of DDD comprises one or more sgRNAs targeting exon 3 of cTNFRSF1B. In some embodiments, the CRISPR gene-editing system for the treatment of DDD comprises one or more sgRNAs targeting exon 4 of cTNFRSF1B. In some embodiments, the CRISPR gene-editing system for the treatment of DDD comprises one or more sgRNAs targeting exon 5 of cTNFRSF1B. In some embodiments, the CRISPR gene-editing system for the treatment of DDD comprises one or more sgRNAs targeting exon 6 of cTNFRSF1B. In some embodiments, the CRISPR gene-editing system for the treatment of DDD comprises one or more sgRNAs targeting exon 7 of cTNFRSF1B. In some embodiments, the CRISPR gene-editing system for the treatment of DDD comprises one or more sgRNAs targeting exon 8 of cTNFRSF1B. In some embodiments, the CRISPR gene-editing system for the treatment of DDD comprises one or more sgRNAs targeting exon 9 of cTNFRSF1B. In some embodiments, the CRISPR gene-editing system for the treatment of DDD comprises one or more sgRNAs targeting exon 10 of cTNFRSF1B. In some embodiments, the CRISPR gene-editing system for the treatment of DDD comprises one or more sgRNAs targeting exon 11 of cTNFRSF1B. In some embodiments, the CRISPR gene-editing system for the treatment of DDD comprising one or more sgRNAs targeting an exon of cTNFRSF1B is delivered via one or more lipid nanoparticles (LNPs), the LNPs comprising an LNP system described herein, e.g., and without limitation, any one of LNP systems LNP001 to LNP240.

[0540] In some embodiments, the CRISPR gene-editing system for the treatment of DDD comprises one or more sgRNAs targeting exon 1 of eTNFRSF1B. In some embodiments, the CRISPR gene-editing system for the treatment of DDD comprises one or more sgRNAs targeting exon 2 of eTNFRSF1B. In some embodiments, the CRISPR gene-editing system for the treatment of DDD comprises one or more sgRNAs targeting exon 3 of eTNFRSF1B. In some embodiments, the CRISPR gene-editing system for the treatment of DDD comprises one or more sgRNAs targeting exon 4 of eTNFRSF1B. In some embodiments, the CRISPR gene-editing system for the treatment of DDD comprises one or more sgRNAs targeting exon 5 of eTNFRSF1B. In some embodiments, the CRISPR gene-editing system for the treatment of DDD comprises one or more sgRNAs targeting exon 6 of eTNFRSF1B. In some embodiments, the CRISPR gene-editing system for the treatment of DDD comprises one or more sgRNAs targeting exon 7 of eTNFRSF1B. In some embodiments, the CRISPR gene-editing system for the treatment of DDD comprises one or more sgRNAs targeting exon 8 of eTNFRSF1B. In some embodiments, the CRISPR gene-editing system for the treatment of DDD comprises one or more sgRNAs targeting exon 9 of eTNFRSF1B. In some embodiments, the CRISPR gene-editing system for the treatment of DDD comprises one or more sgRNAs targeting exon 10 of eTNFRSF1B. In some embodiments, the CRISPR gene-editing system for the treatment of DDD comprises one or more sgRNAs targeting exon 11 of eTNFRSF1B. In some embodiments, the CRISPR gene-editing system for the treatment of DDD comprising one or more sgRNAs targeting an exon of eTNFRSF1B is delivered via one or more lipid nanoparticles (LNPs), the LNPs comprising an LNP system described herein, e.g., and without limitation, any one of LNP systems LNP001 to LNP240.

[0541] In some embodiments, the CRISPR gene-editing system for the treatment of DDD comprises one or more sgRNAs targeting exon 1 of fTNFRSF1B. In some embodiments, the CRISPR gene-editing system for the treatment of DDD comprises one or more sgRNAs targeting exon 2 of fTNFRSF1B. In some embodiments, the CRISPR gene-editing system for the treatment of DDD comprises one or more sgRNAs targeting exon 3 of fTNFRSF1B. In some embodiments, the CRISPR gene-editing system for the treatment of DDD comprises one or more sgRNAs targeting exon 4 of fTNFRSF1B. In some embodiments, the CRISPR gene-editing system for the treatment of DDD comprises one or more sgRNAs targeting exon 5 of fTNFRSF1B. In some embodiments, the CRISPR gene-editing system for the treatment of DDD comprises one or more sgRNAs targeting exon 6 of fTNFRSF1B. In some embodiments, the CRISPR gene-editing system for the treatment of DDD comprises one or more sgRNAs targeting exon 7 of fTNFRSF1B. In some embodiments, the CRISPR gene-editing system for the treatment of DDD comprises one or more sgRNAs targeting exon 8 of fTNFRSF1B. In some embodiments, the CRISPR gene-editing system for the treatment of DDD comprises one or more sgRNAs targeting exon 9 of fTNFRSF1B. In some embodiments, the CRISPR gene-editing system for the treatment of DDD comprises one or more sgRNAs targeting exon 10 of fTNFRSF1B. In some embodiments, the CRISPR gene-editing system for the treatment of DDD comprising one or more sgRNAs targeting an exon of fTNFRSF1B is delivered via one or more lipid nanoparticles (LNPs), the LNPs comprising an LNP system described herein, e.g., and without limitation, any one of LNP systems LNP001 to LNP240.

[0542] In some embodiments, the CRISPR gene-editing system for the treatment of DDD comprises one or more sgRNAs targeting TNFRSF3. In some embodiments, the CRISPR gene-editing system for the treatment of DDD comprises one or more sgRNAs targeting hTNFRSF3. In some embodiments, the CRISPR gene-editing system for the treatment of DDD comprises one or more sgRNAs targeting cTNFRSF3. In some embodiments, the CRISPR gene-editing system for the treatment of DDD comprises one or more sgRNAs targeting eTNFRSF3. In some embodiments, the CRISPR gene-editing system for the treatment of DDD comprises one or more sgRNAs targeting fTNFRSF3. In some embodiments, the CRISPR gene-editing system for the treatment of DDD comprising one or more sgRNAs targeting an exon of TNFRSF3 is delivered via one or more lipid nanoparticles (LNPs), the LNPs comprising an LNP system described herein, e.g., and without limitation, any one of LNP systems LNP001 to LNP240.

[0543] In some embodiments, the CRISPR gene-editing system for the treatment of DDD comprises one or more sgRNAs targeting exon 1 of hTNFRSF3. In some embodiments, the CRISPR gene-editing system for the treatment of DDD comprises one or more sgRNAs targeting exon 2 of hTNFRSF3. In some embodiments, the CRISPR gene-editing system for the treatment of DDD comprises one or more sgRNAs targeting exon 3 of hTNFRSF3. In some embodiments, the CRISPR gene-editing system for the treatment of DDD comprises one or more sgRNAs targeting exon 4 of hTNFRSF3. In some embodiments, the CRISPR gene-editing system for the treatment of DDD comprises one or more sgRNAs targeting exon 5 of hTNFRSF3. In some embodiments, the CRISPR gene-editing system for the treatment of DDD comprises one or more sgRNAs targeting exon 6 of hTNFRSF3. In some embodiments, the CRISPR gene-editing system for the treatment of DDD comprises one or more sgRNAs targeting exon 7 of hTNFRSF3. In some embodiments, the CRISPR gene-editing system for the treatment of DDD comprises one or more sgRNAs targeting exon 8 of hTNFRSF3. In some embodiments, the CRISPR gene-editing system for the treatment of DDD comprises one or more sgRNAs targeting exon 9 of hTNFRSF3. In some embodiments, the CRISPR gene-editing system for the treatment of DDD comprises one or more sgRNAs targeting exon 10 of hTNFRSF3. In some embodiments, the CRISPR gene-editing system for the treatment of DDD comprises one or more sgRNAs targeting exon 11 of hTNFRSF3. In some embodiments, the CRISPR gene-editing system for the treatment of DDD comprises one or more sgRNAs targeting exon 12 of hTNFRSF3. In some embodiments, the CRISPR gene-editing system for the treatment of DDD comprising one or more sgRNAs targeting an exon of hTNFRSF3 is delivered via one or more lipid nanoparticles (LNPs), the LNPs comprising an LNP system described herein, e.g., and without limitation, any one of LNP systems LNP001 to LNP240.

[0544] In some embodiments, the CRISPR gene-editing system for the treatment of DDD comprises one or more sgRNAs targeting exon 1 of cTNFRSF3. In some embodiments, the CRISPR gene-editing system for the treatment of DDD comprises one or more sgRNAs targeting exon 2 of cTNFRSF3. In some embodiments, the CRISPR gene-editing system for the treatment of DDD comprises one or more sgRNAs targeting exon 3 of cTNFRSF3. In some embodiments, the CRISPR gene-editing system for the treatment of DDD comprises one or more sgRNAs targeting exon 4 of cTNFRSF3. In some embodiments, the CRISPR gene-editing system for the treatment of DDD comprises one or more sgRNAs targeting exon 5 of cTNFRSF3. In some embodiments, the CRISPR gene-editing system for the treatment of DDD comprises one or more sgRNAs targeting exon 6 of cTNFRSF3. In some embodiments, the CRISPR gene-editing system for the treatment of DDD comprises one or more sgRNAs targeting exon 7 of cTNFRSF3. In some embodiments, the CRISPR gene-editing system for the treatment of DDD comprises one or more sgRNAs targeting exon 8 of cTNFRSF3. In some embodiments, the CRISPR gene-editing system for the treatment of DDD comprises one or more sgRNAs targeting exon 9 of cTNFRSF3. In some embodiments, the CRISPR gene-editing system for the treatment of DDD comprises one or more sgRNAs targeting exon 10 of cTNFRSF3. In some embodiments, the CRISPR gene-editing system for the treatment of DDD comprising one or more sgRNAs targeting an exon of cTNFRSF3 is delivered via one or more lipid nanoparticles (LNPs), the LNPs comprising an LNP system described herein, e.g., and without limitation, any one of LNP systems LNP001 to LNP240.

[0545] In some embodiments, the CRISPR gene-editing system for the treatment of DDD comprises one or more sgRNAs targeting exon 1 of eTNFRSF3. In some embodiments, the CRISPR gene-editing system for the treatment of DDD comprises one or more sgRNAs targeting exon 2 of eTNFRSF3. In some embodiments, the CRISPR gene-editing system for the treatment of DDD comprises one or more sgRNAs targeting exon 3 of eTNFRSF3. In some embodiments, the CRISPR gene-editing system for the treatment of DDD comprises one or more sgRNAs targeting exon 4 of eTNFRSF3. In some embodiments, the CRISPR gene-editing system for the treatment of DDD comprises one or more sgRNAs targeting exon 5 of eTNFRSF3. In some embodiments, the CRISPR gene-editing system for the treatment of DDD comprises one or more sgRNAs targeting exon 6 of eTNFRSF3. In some embodiments, the CRISPR gene-editing system for the treatment of DDD comprises one or more sgRNAs targeting exon 7 of eTNFRSF3. In some embodiments, the CRISPR gene-editing system for the treatment of DDD comprises one or more sgRNAs targeting exon 8 of eTNFRSF3. In some embodiments, the CRISPR gene-editing system for the treatment of DDD comprises one or more sgRNAs targeting exon 9 of eTNFRSF3. In some embodiments, the CRISPR gene-editing system for the treatment of DDD comprises one or more sgRNAs targeting exon 10 of eTNFRSF3. In some embodiments, the CRISPR gene-editing system for the treatment of DDD comprising one or more sgRNAs targeting an exon of eTNFRSF3 is delivered via one or more lipid nanoparticles (LNPs), the LNPs comprising an LNP system described herein, e.g., and without limitation, any one of LNP systems LNP001 to LNP240.

[0546] In some embodiments, the CRISPR gene-editing system for the treatment of DDD comprises one or more sgRNAs targeting exon 1 of fTNFRSF3. In some embodiments, the CRISPR gene-editing system for the treatment of DDD comprises one or more sgRNAs targeting exon 2 of fTNFRSF3. In some embodiments, the CRISPR gene-editing system for the treatment of DDD comprises one or more sgRNAs targeting exon 3 of fTNFRSF3. In some embodiments, the CRISPR gene-editing system for the treatment of DDD comprises one or more sgRNAs targeting exon 4 of fTNFRSF3. In some embodiments, the CRISPR gene-editing system for the treatment of DDD comprises one or more sgRNAs targeting exon 5 of fTNFRSF3. In some embodiments, the CRISPR gene-editing system for the treatment of DDD comprises one or more sgRNAs targeting exon 6 of fTNFRSF3. In some embodiments, the CRISPR gene-editing system for the treatment of DDD comprises one or more sgRNAs targeting exon 7 of fTNFRSF3. In some embodiments, the CRISPR gene-editing system for the treatment of DDD comprises one or more sgRNAs targeting exon 8 of fTNFRSF3. In some embodiments, the CRISPR gene-editing system for the treatment of DDD comprises one or more sgRNAs targeting exon 9 of fTNFRSF3. In some embodiments, the CRISPR gene-editing system for the treatment of DDD comprises one or more sgRNAs targeting exon 10 of fTNFRSF3. In some embodiments, the CRISPR gene-editing system for the treatment of DDD comprising one or more sgRNAs targeting an exon of fTNFRSF3 is delivered via one or more lipid nanoparticles (LNPs), the LNPs comprising an LNP system described herein, e.g., and without limitation, any one of LNP systems LNP001 to LNP240.

[0547] In some embodiments, the CRISPR gene-editing system for the treatment of DDD comprises one or more sgRNAs targeting TNFRSF4. In some embodiments, the CRISPR gene-editing system for the treatment of DDD comprises one or more sgRNAs targeting hTNFRSF4. In some embodiments, the CRISPR gene-editing system for the treatment of DDD comprises one or more sgRNAs targeting cTNFRSF4. In some embodiments, the CRISPR gene-editing system for the treatment of DDD comprises one or more sgRNAs targeting eTNFRSF4. In some embodiments, the CRISPR gene-editing system for the treatment of DDD comprises one or more sgRNAs targeting fTNFRSF4. In some embodiments, the CRISPR gene-editing system for the treatment of DDD comprising one or more sgRNAs targeting an exon of TNFRSF4 is delivered via one or more lipid nanoparticles (LNPs), the LNPs comprising an LNP system described herein, e.g., and without limitation, any one of LNP systems LNP001 to LNP240.

[0548] In some embodiments, the CRISPR gene-editing system for the treatment of DDD comprises one or more sgRNAs targeting exon 1 of hTNFRSF4. In some embodiments, the CRISPR gene-editing system for the treatment of DDD comprises one or more sgRNAs targeting exon 2 of hTNFRSF4. In some embodiments, the CRISPR gene-editing system for the treatment of DDD comprises one or more sgRNAs targeting exon 3 of hTNFRSF4. In some embodiments, the CRISPR gene-editing system for the treatment of DDD comprises one or more sgRNAs targeting exon 4 of hTNFRSF4. In some embodiments, the CRISPR gene-editing system for the treatment of DDD comprises one or more sgRNAs targeting exon 5 of hTNFRSF4. In some embodiments, the CRISPR gene-editing system for the treatment of DDD comprises one or more sgRNAs targeting exon 6 of hTNFRSF4. In some embodiments, the CRISPR gene-editing system for the treatment of DDD comprising one or more sgRNAs targeting an exon of hTNFRSF4 is delivered via one or more lipid nanoparticles (LNPs), the LNPs comprising an LNP system described herein, e.g., and without limitation, any one of LNP systems LNP001 to LNP240.

[0549] In some embodiments, the CRISPR gene-editing system for the treatment of DDD comprises one or more sgRNAs targeting exon 1 of cTNFRSF4. In some embodiments, the CRISPR gene-editing system for the treatment of DDD comprises one or more sgRNAs targeting exon 2 of cTNFRSF4. In some embodiments, the CRISPR gene-editing system for the treatment of DDD comprises one or more sgRNAs targeting exon 3 of cTNFRSF4. In some embodiments, the CRISPR gene-editing system for the treatment of DDD comprises one or more sgRNAs targeting exon 4 of cTNFRSF4. In some embodiments, the CRISPR gene-editing system for the treatment of DDD comprises one or more sgRNAs targeting exon 5 of cTNFRSF4. In some embodiments, the CRISPR gene-editing system for the treatment of DDD comprises one or more sgRNAs targeting exon 6 of cTNFRSF4. In some embodiments, the CRISPR gene-editing system for the treatment of DDD comprises one or more sgRNAs targeting exon 7 of cTNFRSF4. In some embodiments, the CRISPR gene-editing system for the treatment of DDD comprising one or more sgRNAs targeting an exon of cTNFRSF4 is delivered via one or more lipid nanoparticles (LNPs), the LNPs comprising an LNP system described herein, e.g., and without limitation, any one of LNP systems LNP001 to LNP240.

[0550] In some embodiments, the CRISPR gene-editing system for the treatment of DDD comprises one or more sgRNAs targeting exon 1 of eTNFRSF4. In some embodiments, the CRISPR gene-editing system for the treatment of DDD comprises one or more sgRNAs targeting exon 2 of eTNFRSF4. In some embodiments, the CRISPR gene-editing system for the treatment of DDD comprises one or more sgRNAs targeting exon 3 of eTNFRSF4. In some embodiments, the CRISPR gene-editing system for the treatment of DDD comprises one or more sgRNAs targeting exon 4 of eTNFRSF4. In some embodiments, the CRISPR gene-editing system for the treatment of DDD comprises one or more sgRNAs targeting exon 5 of eTNFRSF4. In some embodiments, the CRISPR gene-editing system for the treatment of DDD comprises one or more sgRNAs targeting exon 6 of eTNFRSF4. In some embodiments, the CRISPR gene-editing system for the treatment of DDD comprises one or more sgRNAs targeting exon 7 of eTNFRSF4. In some embodiments, the CRISPR gene-editing system for the treatment of DDD comprising one or more sgRNAs targeting an exon of eTNFRSF4 is delivered via one or more lipid nanoparticles (LNPs), the LNPs comprising an LNP system described herein, e.g., and without limitation, any one of LNP systems LNP001 to LNP240.

[0551] In some embodiments, the CRISPR gene-editing system for the treatment of DDD comprises one or more sgRNAs targeting exon 1 of fTNFRSF4. In some embodiments, the CRISPR gene-editing system for the treatment of DDD comprises one or more sgRNAs targeting exon 2 of fTNFRSF4. In some embodiments, the CRISPR gene-editing system for the treatment of DDD comprises one or more sgRNAs targeting exon 3 of fTNFRSF4. In some embodiments, the CRISPR gene-editing system for the treatment of DDD comprises one or more sgRNAs targeting exon 4 of fTNFRSF4. In some embodiments, the CRISPR gene-editing system for the treatment of DDD comprises one or more sgRNAs targeting exon 5 of fTNFRSF4. In some embodiments, the CRISPR gene-editing system for the treatment of DDD comprises one or more sgRNAs targeting exon 6 of fTNFRSF4. In some embodiments, the CRISPR gene-editing system for the treatment of DDD comprises one or more sgRNAs targeting exon 7 of fTNFRSF4. In some embodiments, the CRISPR gene-editing system for the treatment of DDD comprising one or more sgRNAs targeting an exon of fTNFRSF4 is delivered via one or more lipid nanoparticles (LNPs), the LNPs comprising an LNP system described herein, e.g., and without limitation, any one of LNP systems LNP001 to LNP240.

[0552] In some embodiments, the CRISPR gene-editing system for the treatment of DDD comprises one or more sgRNAs targeting TNFRSF11A. In some embodiments, the CRISPR gene-editing system for the treatment of DDD comprises one or more sgRNAs targeting hTNFRSF11A. In some embodiments, the CRISPR gene-editing system for the treatment of DDD comprises one or more sgRNAs targeting cTNFRSF11A. In some embodiments, the CRISPR gene-editing system for the treatment of DDD comprises one or more sgRNAs targeting eTNFRSF11A. In some embodiments, the CRISPR gene-editing system for the treatment of DDD comprises one or more sgRNAs targeting fTNFRSF11A. In some embodiments, the CRISPR gene-editing system for the treatment of DDD comprising one or more sgRNAs targeting an exon of TNFRSF11A is delivered via one or more lipid nanoparticles (LNPs), the LNPs comprising an LNP system described herein, e.g., and without limitation, any one of LNP systems LNP001 to LNP240.

[0553] In some embodiments, the CRISPR gene-editing system for the treatment of DDD comprises one or more sgRNAs targeting exon 1 of hTNFRSF11A. In some embodiments, the CRISPR gene-editing system for the treatment of DDD comprises one or more sgRNAs targeting exon 2 of hTNFRSF11A. In some embodiments, the CRISPR gene-editing system for the treatment of DDD comprises one or more sgRNAs targeting exon 3 of hTNFRSF11A. In some embodiments, the CRISPR gene-editing system for the treatment of DDD comprises one or more sgRNAs targeting exon 4 of hTNFRSF11A. In some embodiments, the CRISPR gene-editing system for the treatment of DDD comprises one or more sgRNAs targeting exon 5 of hTNFRSF11A. In some embodiments, the CRISPR gene-editing system for the treatment of DDD comprises one or more sgRNAs targeting exon 6 of hTNFRSF11A. In some embodiments, the CRISPR gene-editing system for the treatment of DDD comprises one or more sgRNAs targeting exon 7 of hTNFRSF11A. In some embodiments, the CRISPR gene-editing system for the treatment of DDD comprises one or more sgRNAs targeting exon 8 of hTNFRSF11A. In some embodiments, the CRISPR gene-editing system for the treatment of DDD comprises one or more sgRNAs targeting exon 9 of hTNFRSF11A. In some embodiments, the CRISPR gene-editing system for the treatment of DDD comprises one or more sgRNAs targeting exon 10 of hTNFRSF11A. In some embodiments, the CRISPR gene-editing system for the treatment of DDD comprises one or more sgRNAs targeting exon 11 of hTNFRSF11A. In some embodiments, the CRISPR gene-editing system for the treatment of DDD comprises one or more sgRNAs targeting exon 12 of hTNFRSF11A. In some embodiments, the CRISPR gene-editing system for the treatment of DDD comprising one or more sgRNAs targeting an exon of hTNFRSF11A is delivered via one or more lipid nanoparticles (LNPs), the LNPs comprising an LNP system described herein, e.g., and without limitation, any one of LNP systems LNP001 to LNP240.

[0554] In some embodiments, the CRISPR gene-editing system for the treatment of DDD comprises one or more sgRNAs targeting exon 1 of cTNFRSF11A. In some embodiments, the CRISPR gene-editing system for the treatment of DDD comprises one or more sgRNAs targeting exon 2 of cTNFRSF11A. In some embodiments, the CRISPR gene-editing system for the treatment of DDD comprises one or more sgRNAs targeting exon 3 of cTNFRSF11A. In some embodiments, the CRISPR gene-editing system for the treatment of DDD comprises one or more sgRNAs targeting exon 4 of cTNFRSF11A. In some embodiments, the CRISPR gene-editing system for the treatment of DDD comprises one or more sgRNAs targeting exon 5 of cTNFRSF11A. In some embodiments, the CRISPR gene-editing system for the treatment of DDD comprises one or more sgRNAs targeting exon 6 of cTNFRSF11A. In some embodiments, the CRISPR gene-editing system for the treatment of DDD comprises one or more sgRNAs targeting exon 7 of cTNFRSF11A. In some embodiments, the CRISPR gene-editing system for the treatment of DDD comprises one or more sgRNAs targeting exon 8 of cTNFRSF11A. In some embodiments, the CRISPR gene-editing system for the treatment of DDD comprises one or more sgRNAs targeting exon 9 of cTNFRSF11A. In some embodiments, the CRISPR gene-editing system for the treatment of DDD comprises one or more sgRNAs targeting exon 10 of cTNFRSF11A. In some embodiments, the CRISPR gene-editing system for the treatment of DDD comprises one or more sgRNAs targeting exon 11 of cTNFRSF11A. In some embodiments, the CRISPR gene-editing system for the treatment of DDD comprising one or more sgRNAs targeting an exon of cTNFRSF11A is delivered via one or more lipid nanoparticles (LNPs), the LNPs comprising an LNP system described herein, e.g., and without limitation, any one of LNP systems LNP001 to LNP240.

[0555] In some embodiments, the CRISPR gene-editing system for the treatment of DDD comprises one or more sgRNAs targeting exon 1 of eTNFRSF11A. In some embodiments, the CRISPR gene-editing system for the treatment of DDD comprises one or more sgRNAs targeting exon 2 of eTNFRSF11A. In some embodiments, the CRISPR gene-editing system for the treatment of DDD comprises one or more sgRNAs targeting exon 3 of eTNFRSF11A. In some embodiments, the CRISPR gene-editing system for the treatment of DDD comprises one or more sgRNAs targeting exon 4 of eTNFRSF11A. In some embodiments, the CRISPR gene-editing system for the treatment of DDD comprises one or more sgRNAs targeting exon 5 of eTNFRSF11A. In some embodiments, the CRISPR gene-editing system for the treatment of DDD comprises one or more sgRNAs targeting exon 6 of eTNFRSF11A. In some embodiments, the CRISPR gene-editing system for the treatment of DDD comprises one or more sgRNAs targeting exon 7 of eTNFRSF11A. In some embodiments, the CRISPR gene-editing system for the treatment of DDD comprises one or more sgRNAs targeting exon 8 of eTNFRSF11A. In some embodiments, the CRISPR gene-editing system for the treatment of DDD comprises one or more sgRNAs targeting exon 9 of eTNFRSF11A. In some embodiments, the CRISPR gene-editing system for the treatment of DDD comprises one or more sgRNAs targeting exon 10 of eTNFRSF11A. In some embodiments, the CRISPR gene-editing system for the treatment of DDD comprising one or more sgRNAs targeting an exon of eTNFRSF11A is delivered via one or more lipid nanoparticles (LNPs), the LNPs comprising an LNP system described herein, e.g., and without limitation, any one of LNP systems LNP001 to LNP240.

[0556] In some embodiments, the CRISPR gene-editing system for the treatment of DDD comprises one or more sgRNAs targeting exon 1 of fTNFRSF11A. In some embodiments, the CRISPR gene-editing system for the treatment of DDD comprises one or more sgRNAs targeting exon 2 of fTNFRSF11A. In some embodiments, the CRISPR gene-editing system for the treatment of DDD comprises one or more sgRNAs targeting exon 3 of fTNFRSF11A. In some embodiments, the CRISPR gene-editing system for the treatment of DDD comprises one or more sgRNAs targeting exon 4 of fTNFRSF11A. In some embodiments, the CRISPR gene-editing system for the treatment of DDD comprises one or more sgRNAs targeting exon 5 of fTNFRSF11A. In some embodiments, the CRISPR gene-editing system for the treatment of DDD comprises one or more sgRNAs targeting exon 6 of fTNFRSF11A. In some embodiments, the CRISPR gene-editing system for the treatment of DDD comprises one or more sgRNAs targeting exon 7 of fTNFRSF11A. In some embodiments, the CRISPR gene-editing system for the treatment of DDD comprises one or more sgRNAs targeting exon 8 of fTNFRSF11A. In some embodiments, the CRISPR gene-editing system for the treatment of DDD comprises one or more sgRNAs targeting exon 9 of fTNFRSF11A. In some embodiments, the CRISPR gene-editing system for the treatment of DDD comprises one or more sgRNAs targeting exon 10 of fTNFRSF11A. In some embodiments, the CRISPR gene-editing system for the treatment of DDD comprises one or more sgRNAs targeting exon 11 of fTNFRSF11A. In some embodiments, the CRISPR gene-editing system for the treatment of DDD comprising one or more sgRNAs targeting an exon of fTNFRSF11A is delivered via one or more lipid nanoparticles (LNPs), the LNPs comprising an LNP system described herein, e.g., and without limitation, any one of LNP systems LNP001 to LNP240.

### D. IDD

[0557] In one aspect, the present disclosure encompasses treatments for internal disc disruption (IDD). In some embodiments, the IDD treatment comprises a therapeutically effective amount of a Clustered Regularly Interspaced Short Palindromic Repeats (CRISPR) gene-editing system, the system comprising: (i) a CRISPR Associated (Cas) protein; and (ii) at least one guide RNA targeting IL1R1. In some embodiments, the IDD treatment comprises a CRISPR gene-editing system targeting hIL1R1. In some embodiments, the IDD treatment comprises a CRISPR gene-editing system targeting cIL1RT. In some embodiments, the IDD treatment comprises a CRISP gene-editing system R targeting eIL1R1. In some embodiments, the IDD treatment comprises a CRISPR gene-editing system targeting fIL1R1. In some embodiments, the CRISPR gene-editing system for the treatment of IDD comprising one or more sgRNAs targeting an exon of IL1R1 is delivered via one or more lipid nanoparticles (LNPs), the LNPs comprising an LNP system described herein, e.g., and without limitation, any one of LNP systems LNP001 to LNP240.

[0558] In some embodiments, the CRISPR gene-editing system for the treatment of IDD comprises one or more sgRNAs targeting exon 1 of hIL1R1. In some embodiments, the CRISPR gene-editing system for the treatment of IDD comprises one or more sgRNAs targeting exon 2 of hIL1R1. In some embodiments, the CRISPR gene-editing system for the treatment of IDD comprises one or more sgRNAs targeting exon 3 of hIL1R1. In some embodiments, the CRISPR gene-editing system for the treatment of IDD comprises one or more sgRNAs targeting exon 4 of hIL1R1. In some embodiments, the CRISPR gene-editing system for the treatment of IDD comprises one or more sgRNAs targeting exon 5 of hIL1R1. In some embodiments, the CRISPR gene-editing system for the treatment of IDD comprises one or more sgRNAs targeting exon 6 of hIL1R1. In some embodiments, the CRISPR gene-editing system for the treatment of IDD comprises one or more sgRNAs targeting exon 7 of hIL1R1. In some embodiments, the CRISPR gene-editing system for the treatment of IDD comprises one or more sgRNAs targeting exon 8 of hIL1R1. In some embodiments, the CRISPR gene-editing system for the treatment of IDD comprises one or more sgRNAs targeting exon 9 of hIL1R1. In some embodiments, the CRISPR gene-editing system for the treatment of IDD comprises one or more sgRNAs targeting exon 10 of hIL1R1. In some embodiments, the CRISPR gene-editing system for the treatment of IDD comprises one or more sgRNAs targeting exon 11 of hIL1R1. In some embodiments, the CRISPR gene-editing system for the treatment of IDD comprises one or more sgRNAs targeting exon 12 of hIL1R1. In some embodiments, the CRISPR gene-editing system for the treatment of IDD comprises one or more sgRNAs targeting exon 13 of hIL1R1. In some embodiments, the CRISPR gene-editing system for the treatment of IDD comprises one or more sgRNAs targeting exon 14 of hIL1R1. In some embodiments, the CRISPR gene-editing system for the treatment of IDD comprises one or more sgRNAs targeting exon 15 of hIL1R1. In some embodiments, the CRISPR gene-editing system for the treatment of IDD comprises one or more sgRNAs targeting exon 16 of hIL1R1. In some embodiments, the CRISPR gene-editing system for the treatment of IDD comprises one or more sgRNAs targeting exon 17 of hIL1R1. In some embodiments, the CRISPR gene-editing system for the treatment of IDD comprises one or more sgRNAs targeting exon 18 of hIL1R1. In some embodiments, the CRISPR gene-editing system for the treatment of IDD comprises one or more sgRNAs targeting exon 19 of hIL1R1. In some embodiments, the CRISPR gene-editing system for the treatment of IDD comprises one or more sgRNAs targeting exon 20 of hIL1R1. In some embodiments, the CRISPR gene-editing system for the treatment of IDD comprises one or more sgRNAs targeting exon 21 of hIL1R1. In some embodiments, the CRISPR gene-editing system for the treatment of IDD comprising one or more sgRNAs targeting an exon of hIL1R1 is delivered via one or more lipid nanoparticles (LNPs), the LNPs comprising an LNP system described herein, e.g., and without limitation, any one of LNP systems LNP001 to LNP240.

[0559] In some embodiments, the CRISPR gene-editing system for the treatment of IDD comprises one or more sgRNAs targeting exon 1 of cIL1R1. In some embodiments, the CRISPR gene-editing system for the treatment of IDD comprises one or more sgRNAs targeting exon 2 of cIL1R1. In some embodiments, the CRISPR gene-editing system for the treatment of IDD comprises one or more sgRNAs targeting exon 3 of cIL1R1. In some embodiments, the CRISPR gene-editing system for the treatment of IDD comprises one or more sgRNAs targeting exon 4 of cIL1R1. In some embodiments, the CRISPR gene-editing system for the treatment of IDD comprises one or more sgRNAs targeting exon 5 of cIL1R1. In some embodiments, the CRISPR gene-editing system for the treatment of IDD comprises one or more sgRNAs targeting exon 6 of cIL1R1. In some embodiments, the CRISPR gene-editing system for the treatment of IDD comprises one or more sgRNAs targeting exon 7 of cIL1R1. In some embodiments, the CRISPR gene-editing system for the treatment of IDD comprises one or more sgRNAs targeting exon 8 of cIL1R1. In some embodiments, the CRISPR gene-editing system for the treatment of IDD comprises one or more sgRNAs targeting exon 9 of cIL1R1. In some embodiments, the CRISPR gene-editing system for the treatment of IDD comprises one or more sgRNAs targeting exon 10 of cIL1R1. In some embodiments, the CRISPR gene-editing system for the treatment of IDD comprises one or more sgRNAs targeting exon 11 of cIL1R1. In some embodiments, the CRISPR gene-editing system for the treatment of IDD comprises one or more sgRNAs targeting exon 12 of cIL1R1. In some embodiments, the CRISPR gene-editing system for the treatment of IDD comprises one or more sgRNAs targeting exon 13 of cIL1R1. In some embodiments, the CRISPR gene-editing system for the treatment of IDD comprises one or more sgRNAs targeting exon 14 of cIL1R1. In some embodiments, the CRISPR gene-editing system for the treatment of IDD comprises one or more sgRNAs targeting exon 15 of cIL1R1. In some embodiments, the CRISPR gene-editing system for the treatment of IDD comprises one or more sgRNAs targeting exon 16 of cIL1R1. In some embodiments, the CRISPR gene-editing system for the treatment of IDD comprising one or more sgRNAs targeting an exon of cIL1R1 is delivered via one or more lipid nanoparticles (LNPs), the LNPs comprising an LNP system described herein, e.g., and without limitation, any one of LNP systems LNP001 to LNP240.

[0560] In some embodiments, the CRISPR gene-editing system for the treatment of IDD comprises one or more sgRNAs targeting exon 1 of eIL1R1. In some embodiments, the CRISPR gene-editing system for the treatment of IDD comprises one or more sgRNAs targeting exon 2 of eIL1R1. In some embodiments, the CRISPR gene-editing system for the treatment of IDD comprises one or more sgRNAs targeting exon 3 of eIL1R1. In some embodiments, the CRISPR gene-editing system for the treatment of IDD comprises one or more sgRNAs targeting exon 4 of eIL1R1. In some embodiments, the CRISPR gene-editing system for the treatment of IDD comprises one or more sgRNAs targeting exon 5 of eIL1R1. In some embodiments, the CRISPR gene-editing system for the treatment of IDD comprises one or more sgRNAs targeting exon 6 of eIL1R1. In some embodiments, the CRISPR gene-editing system for the treatment of IDD comprises one or more sgRNAs targeting exon 7 of eIL1R1. In some embodiments, the CRISPR gene-editing system for the treatment of IDD comprises one or more sgRNAs targeting exon 8 of eIL1R1. In some embodiments, the CRISPR gene-editing system for the treatment of IDD comprises one or more sgRNAs targeting exon 9 of eIL1R1. In some embodiments, the CRISPR gene-editing system for the treatment of IDD comprises one or more sgRNAs targeting exon 10 of eIL1R1. In some embodiments, the CRISPR gene-editing system for the treatment of IDD comprises one or more sgRNAs targeting exon 11 of eIL1R1. In some embodiments, the CRISPR gene-editing system for the treatment of IDD comprises one or more sgRNAs targeting exon 12 of eIL1R1. In some embodiments, the CRISPR gene-editing system for the treatment of IDD comprises one or more sgRNAs targeting exon 13 of eIL1R1. In some embodiments, the CRISPR gene-editing system for the treatment of IDD comprises one or more sgRNAs targeting exon 14 of eIL1R1. In some embodiments, the CRISPR gene-editing system for the treatment of IDD comprises one or more sgRNAs targeting exon 15 of eIL1R1. In some embodiments, the CRISPR gene-editing system for the treatment of IDD comprising one or more sgRNAs targeting an exon of eIL1R1 is delivered via one or more lipid nanoparticles (LNPs), the LNPs comprising an LNP system described herein, e.g., and without limitation, any one of LNP systems LNP001 to LNP240.

[0561] In some embodiments, the CRISPR gene-editing system for the treatment of IDD comprises one or more sgRNAs targeting exon 1 of fIL1R1. In some embodiments, the CRISPR gene-editing system for the treatment of IDD comprises one or more sgRNAs targeting exon 2 of fIL1R1. In some embodiments, the CRISPR gene-editing system for the treatment of IDD comprises one or more sgRNAs targeting exon 3 of fIL1R1. In some embodiments, the CRISPR gene-editing system for the treatment of IDD comprises one or more sgRNAs targeting exon 4 of fIL1R1. In some embodiments, the CRISPR gene-editing system for the treatment of IDD comprises one or more sgRNAs targeting exon 5 of fIL1R1. In some embodiments, the CRISPR gene-editing system for the treatment of IDD comprises one or more sgRNAs targeting exon 6 of fIL1R1. In some embodiments, the CRISPR gene-editing system for the treatment of IDD comprises one or more sgRNAs targeting exon 7 of fIL1R1. In some embodiments, the CRISPR gene-editing system for the treatment of IDD comprises one or more sgRNAs targeting exon 8 of fIL1R1. In some embodiments, the CRISPR gene-editing system for the treatment of IDD comprises one or more sgRNAs targeting exon 9 of fIL1R1. In some embodiments, the CRISPR gene-editing system for the treatment of IDD comprises one or more sgRNAs targeting exon 10 of fIL1R1. In some embodiments, the CRISPR gene-editing system for the treatment of IDD comprises one or more sgRNAs targeting exon 11 of fIL1R. In some embodiments, the CRISPR gene-editing system for the treatment of IDD comprises one or more sgRNAs targeting exon 12 of fIL1R1. In some embodiments, the CRISPR gene-editing system for the treatment of IDD comprises one or more sgRNAs targeting exon 13 of fIL1R1. In some embodiments, the CRISPR gene-editing system for the treatment of IDD comprises one or more sgRNAs targeting exon 14 of fIL1R1. In some embodiments, the CRISPR gene-editing system for the treatment of IDD comprises one or more sgRNAs targeting exon 15 of fIL1R. In some embodiments, the CRISPR gene-editing system for the treatment of IDD comprises one or more sgRNAs targeting exon 16 of fIL1R1. In some embodiments, the CRISPR gene-editing system for the treatment of IDD comprises one or more sgRNAs targeting exon 17 of fIL1R1. In some embodiments, the CRISPR gene-editing system for the treatment of IDD comprises one or more sgRNAs targeting exon 18 of fIL1R1. In some embodiments, the CRISPR gene-editing system for the treatment of IDD comprising one or more sgRNAs targeting an exon of fIL1R1 is delivered via one or more lipid nanoparticles (LNPs), the LNPs comprising an LNP system described herein, e.g., and without limitation, any one of LNP systems LNP001 to LNP240.

[0562] In some embodiments, the CRISPR gene-editing system for the treatment of IDD comprises one or more sgRNAs targeting IL1RAP. In some embodiments, the CRISPR gene-editing system for the treatment of IDD comprises one or more sgRNAs targeting hIL1RAP. In some embodiments, the CRISPR gene-editing system for the treatment of IDD comprises one or more sgRNAs targeting cIL1RAP. In some embodiments, the CRISPR gene-editing system for the treatment of IDD comprises one or more sgRNAs targeting eIL1RAP. In some embodiments, the CRISPR gene-editing system for the treatment of IDD comprises one or more sgRNAs targeting fIL1RAP. In some embodiments, the CRISPR gene-editing system for the treatment of IDD comprising one or more sgRNAs targeting an exon of IL1RAP is delivered via one or more lipid nanoparticles (LNPs), the LNPs comprising an LNP system described herein, e.g., and without limitation, any one of LNP systems LNP001 to LNP240.

[0563] In some embodiments, the CRISPR gene-editing system for the treatment of IDD comprises one or more sgRNAs targeting exon 1 of hIL1RAP. In some embodiments, the CRISPR gene-editing system for the treatment of IDD comprises one or more sgRNAs targeting exon 2 of hIL1RAP. In some embodiments, the CRISPR gene-editing system for the treatment of IDD comprises one or more sgRNAs targeting exon 3 of hIL1RAP. In some embodiments, the CRISPR gene-editing system for the treatment of IDD comprises one or more sgRNAs targeting exon 4 of hIL1RAP. In some embodiments, the CRISPR gene-editing system for the treatment of IDD comprises one or more sgRNAs targeting exon 5 of hIL1RAP. In some embodiments, the CRISPR gene-editing system for the treatment of IDD comprises one or more sgRNAs targeting exon 6 of hIL1RAP. In some embodiments, the CRISPR gene-editing system for the treatment of IDD comprises one or more sgRNAs targeting exon 7 of hIL1RAP. In some embodiments, the CRISPR gene-editing system for the treatment of IDD comprises one or more sgRNAs targeting exon 8 of hIL1RAP. In some embodiments, the CRISPR gene-editing system for the treatment of IDD comprises one or more sgRNAs targeting exon 9 of hIL1RAP. In some embodiments, the CRISPR gene-editing system for the treatment of IDD comprises one or more sgRNAs targeting exon 10 of hIL1RAP. In some embodiments, the CRISPR gene-editing system for the treatment of IDD comprises one or more sgRNAs targeting exon 11 of hIL1RAP. In some embodiments, the CRISPR gene-editing system for the treatment of IDD comprises one or more sgRNAs targeting exon 12 of hIL1RAP. In some embodiments, the CRISPR gene-editing system for the treatment of IDD comprises one or more sgRNAs targeting exon 13 of hIL1RAP. In some embodiments, the CRISPR gene-editing system for the treatment of IDD comprises one or more sgRNAs targeting exon 14 of hIL1RAP. In some embodiments, the CRISPR gene-editing system for the treatment of IDD comprises one or more sgRNAs targeting exon 15 of hIL1RAP. In some embodiments, the CRISPR gene-editing system for the treatment of IDD comprises one or more sgRNAs targeting exon 16 of hIL1RAP. In some embodiments, the CRISPR gene-editing system for the treatment of IDD comprises one or more sgRNAs targeting exon 17 of hIL1RAP. In some embodiments, the CRISPR gene-editing system for the treatment of IDD comprising one or more sgRNAs targeting an exon of hIL1RAP is delivered via one or more lipid nanoparticles (LNPs), the LNPs comprising an LNP system described herein, e.g., and without limitation, any one of LNP systems LNP001 to LNP240.

[0564] In some embodiments, the CRISPR gene-editing system for the treatment of IDD comprises one or more sgRNAs targeting exon 1 of cIL1RAP. In some embodiments, the CRISPR gene-editing system for the treatment of IDD comprises one or more sgRNAs targeting exon 2 of cIL1RAP. In some embodiments, the CRISPR gene-editing system for the treatment of IDD comprises one or more sgRNAs targeting exon 3 of cIL1RAP. In some embodiments, the CRISPR gene-editing system for the treatment of IDD comprises one or more sgRNAs targeting exon 4 of cIL1RAP. In some embodiments, the CRISPR gene-editing system for the treatment of IDD comprises one or more sgRNAs targeting exon 5 of cIL1RAP. In some embodiments, the CRISPR gene-editing system for the treatment of IDD comprises one or more sgRNAs targeting exon 6 of cIL1RAP. In some embodiments, the CRISPR gene-editing system for the treatment of IDD comprises one or more sgRNAs targeting exon 7 of cIL1RAP. In some embodiments, the CRISPR gene-editing system for the treatment of IDD comprises one or more sgRNAs targeting exon 8 of cIL1RAP. In some embodiments, the CRISPR gene-editing system for the treatment of IDD comprises one or more sgRNAs targeting exon 9 of cIL1RAP. In some embodiments, the CRISPR gene-editing system for the treatment of IDD comprises one or more sgRNAs targeting exon 10 of cIL1RAP. In some embodiments, the CRISPR gene-editing system for the treatment of IDD comprises one or more sgRNAs targeting exon 11 of cIL1RAP. In some embodiments, the CRISPR gene-editing system for the treatment of IDD comprises one or more sgRNAs targeting exon 12 of cIL1RAP. In some embodiments, the CRISPR gene-editing system for the treatment of IDD comprises one or more sgRNAs targeting exon 13 of cIL1RAP. In some embodiments, the CRISPR gene-editing system for the treatment of IDD comprises one or more sgRNAs targeting exon 14 of cIL1RAP. In some embodiments, the CRISPR gene-editing system for the treatment of IDD comprises one or more sgRNAs targeting exon 15 of cIL1RAP. In some embodiments, the CRISPR gene-editing system for the treatment of IDD comprises one or more sgRNAs targeting exon 16 of cIL1RAP. In some embodiments, the CRISPR gene-editing system for the treatment of IDD comprising one or more sgRNAs targeting an exon of cIL1RAP is delivered via one or more lipid nanoparticles (LNPs), the LNPs comprising an LNP system described herein, e.g., and without limitation, any one of LNP systems LNP001 to LNP240.

[0565] In some embodiments, the CRISPR gene-editing system for the treatment of IDD comprises one or more sgRNAs targeting exon 1 of eIL1RAP. In some embodiments, the CRISPR gene-editing system for the treatment of IDD comprises one or more sgRNAs targeting exon 2 of eIL1RAP. In some embodiments, the CRISPR gene-editing system for the treatment of IDD comprises one or more sgRNAs targeting exon 3 of eIL1RAP. In some embodiments, the CRISPR gene-editing system for the treatment of IDD comprises one or more sgRNAs targeting exon 4 of eIL1RAP. In some embodiments, the CRISPR gene-editing system for the treatment of IDD comprises one or more sgRNAs targeting exon 5 of eIL1RAP. In some embodiments, the CRISPR gene-editing system for the treatment of IDD comprises one or more sgRNAs targeting exon 6 of eIL1RAP. In some embodiments, the CRISPR gene-editing system for the treatment of IDD comprises one or more sgRNAs targeting exon 7 of eIL1RAP. In some embodiments, the CRISPR gene-editing system for the treatment of IDD comprises one or more sgRNAs targeting exon 8 of eIL1RAP. In some embodiments, the CRISPR gene-editing system for the treatment of IDD comprises one or more sgRNAs targeting exon 9 of eIL1RAP. In some embodiments, the CRISPR gene-editing system for the treatment of IDD comprises one or more sgRNAs targeting exon 10 of eIL1RAP. In some embodiments, the CRISPR gene-editing system for the treatment of IDD comprises one or more sgRNAs targeting exon 11 of eIL1RAP. In some embodiments, the CRISPR gene-editing system for the treatment of IDD comprises one or more sgRNAs targeting exon 12 of eIL1RAP. In some embodiments, the CRISPR gene-editing system for the treatment of IDD comprises one or more sgRNAs targeting exon 13 of eIL1RAP. In some embodiments, the CRISPR gene-editing system for the treatment of IDD comprising one or more sgRNAs targeting an exon of eIL1RAP is delivered via one or more lipid nanoparticles (LNPs), the LNPs comprising an LNP system described herein, e.g., and without limitation, any one of LNP systems LNP001 to LNP240.

[0566] In some embodiments, the CRISPR gene-editing system for the treatment of IDD comprises one or more sgRNAs targeting exon 1 of fIL1RAP. In some embodiments, the CRISPR gene-editing system for the treatment of IDD comprises one or more sgRNAs targeting exon 2 of fIL1RAP. In some embodiments, the CRISPR gene-editing system for the treatment of IDD comprises one or more sgRNAs targeting exon 3 of fIL1RAP. In some embodiments, the CRISPR gene-editing system for the treatment of IDD comprises one or more sgRNAs targeting exon 4 of fIL1RAP. In some embodiments, the CRISPR gene-editing system for the treatment of IDD comprises one or more sgRNAs targeting exon 5 of fIL1RAP. In some embodiments, the CRISPR gene-editing system for the treatment of IDD comprises one or more sgRNAs targeting exon 6 of fIL1RAP. In some embodiments, the CRISPR gene-editing system for the treatment of IDD comprises one or more sgRNAs targeting exon 7 of fIL1RAP. In some embodiments, the CRISPR gene-editing system for the treatment of IDD comprises one or more sgRNAs targeting exon 8 of fIL1RAP. In some embodiments, the CRISPR gene-editing system for the treatment of IDD comprises one or more sgRNAs targeting exon 9 of fIL1RAP. In some embodiments, the CRISPR gene-editing system for the treatment of IDD comprises one or more sgRNAs targeting exon 10 of fIL1RAP. In some embodiments, the CRISPR gene-editing system for the treatment of IDD comprises one or more sgRNAs targeting exon 11 of fIL1RAP. In some embodiments, the CRISPR gene-editing system for the treatment of IDD comprises one or more sgRNAs targeting exon 12 of fIL1RAP. In some embodiments, the CRISPR gene-editing system for the treatment of IDD comprises one or more sgRNAs targeting exon 13 of fIL1RAP. In some embodiments, the CRISPR gene-editing system for the treatment of IDD comprises one or more sgRNAs targeting exon 14 of fIL1RAP. In some embodiments, the CRISPR gene-editing system for the treatment of IDD comprising one or more sgRNAs targeting an exon of fIL1RAP is delivered via one or more lipid nanoparticles (LNPs), the LNPs comprising an LNP system described herein, e.g., and without limitation, any one of LNP systems LNP001 to LNP240.

[0567] In some embodiments, the CRISPR gene-editing system for the treatment of IDD comprises one or more sgRNAs targeting TGFBR1. In some embodiments, the CRISPR gene-editing system for the treatment of IDD comprises one or more sgRNAs targeting hTGFBR1. In some embodiments, the CRISPR gene-editing system for the treatment of IDD comprises one or more sgRNAs targeting cTGFBR1. In some embodiments, the CRISPR gene-editing system for the treatment of IDD comprises one or more sgRNAs targeting e TGFBR1. In some embodiments, the CRISPR gene-editing system for the treatment of IDD comprises one or more sgRNAs targeting fTGFBR1. In some embodiments, the CRISPR gene-editing system for the treatment of IDD comprising one or more sgRNAs targeting an exon of TGFBR1 is delivered via one or more lipid nanoparticles (LNPs), the LNPs comprising an LNP system described herein, e.g., and without limitation, any one of LNP systems LNP001 to LNP240.

[0568] In some embodiments, the CRISPR gene-editing system for the treatment of IDD comprises one or more sgRNAs targeting exon 1 of hTGFBR1. In some embodiments, the CRISPR gene-editing system for the treatment of IDD comprises one or more sgRNAs targeting exon 2 of hTGFBR1. In some embodiments, the CRISPR gene-editing system for the treatment of IDD comprises one or more sgRNAs targeting exon 3 of hTGFBR1. In some embodiments, the CRISPR gene-editing system for the treatment of IDD comprises one or more sgRNAs targeting exon 4 of hTGFBR1. In some embodiments, the CRISPR gene-editing system for the treatment of IDD comprises one or more sgRNAs targeting exon 5 of hTGFBR1. In some embodiments, the CRISPR gene-editing system for the treatment of IDD comprises one or more sgRNAs targeting exon 6 of hTGFBR1. In some embodiments, the CRISPR gene-editing system for the treatment of IDD comprises one or more sgRNAs targeting exon 7 of hTGFBR1. In some embodiments, the CRISPR gene-editing system for the treatment of IDD comprises one or more sgRNAs targeting exon 8 of hTGFBR1. In some embodiments, the CRISPR gene-editing system for the treatment of IDD comprises one or more sgRNAs targeting exon 9 of hTGFBR1. In some embodiments, the CRISPR gene-editing system for the treatment of IDD comprises one or more sgRNAs targeting exon 10 of hTGFBR1. In some embodiments, the CRISPR gene-editing system for the treatment of IDD comprises one or more sgRNAs targeting exon 11 of hTGFBR1. In some embodiments, the CRISPR gene-editing system for the treatment of IDD comprising one or more sgRNAs targeting an exon of hTGFBR1 is delivered via one or more lipid nanoparticles (LNPs), the LNPs comprising an LNP system described herein, e.g., and without limitation, any one of LNP systems LNP001 to LNP240.

[0569] In some embodiments, the CRISPR gene-editing system for the treatment of IDD comprises one or more sgRNAs targeting exon 1 of cTGFBR1. In some embodiments, the CRISPR gene-editing system for the treatment of IDD comprises one or more sgRNAs targeting exon 2 of cTGFBR1. In some embodiments, the CRISPR gene-editing system for the treatment of IDD comprises one or more sgRNAs targeting exon 3 of cTGFBR1. In some embodiments, the CRISPR gene-editing system for the treatment of IDD comprises one or more sgRNAs targeting exon 4 of cTGFBR1. In some embodiments, the CRISPR gene-editing system for the treatment of IDD comprises one or more sgRNAs targeting exon 5 of cTGFBR1. In some embodiments, the CRISPR gene-editing system for the treatment of IDD comprises one or more sgRNAs targeting exon 6 of cTGFBR1. In some embodiments, the CRISPR gene-editing system for the treatment of IDD comprises one or more sgRNAs targeting exon 7 of cTGFBR1. In some embodiments, the CRISPR gene-editing system for the treatment of IDD comprises one or more sgRNAs targeting exon 8 of cTGFBR1. In some embodiments, the CRISPR gene-editing system for the treatment of IDD comprises one or more sgRNAs targeting exon 9 of cTGFBR1. In some embodiments, the CRISPR gene-editing system for the treatment of IDD comprising one or more sgRNAs targeting an exon of cTGFBR1 is delivered via one or more lipid nanoparticles (LNPs), the LNPs comprising an LNP system described herein, e.g., and without limitation, any one of LNP systems LNP001 to LNP240.

[0570] In some embodiments, the CRISPR gene-editing system for the treatment of IDD comprises one or more sgRNAs targeting exon 1 of eTGFBR1. In some embodiments, the CRISPR gene-editing system for the treatment of IDD comprises one or more sgRNAs targeting exon 2 of eTGFBR1. In some embodiments, the CRISPR gene-editing system for the treatment of IDD comprises one or more sgRNAs targeting exon 3 of eTGFBR1. In some embodiments, the CRISPR gene-editing system for the treatment of IDD comprises one or more sgRNAs targeting exon 4 of eTGFBR1. In some embodiments, the CRISPR gene-editing system for the treatment of IDD comprises one or more sgRNAs targeting exon 5 of eTGFBR1. In some embodiments, the CRISPR gene-editing system for the treatment of IDD comprises one or more sgRNAs targeting exon 6 of eTGFBR1. In some embodiments, the CRISPR gene-editing system for the treatment of IDD comprises one or more sgRNAs targeting exon 7 of eTGFBR1. In some embodiments, the CRISPR gene-editing system for the treatment of IDD comprises one or more sgRNAs targeting exon 8 of eTGFBR1. In some embodiments, the CRISPR gene-editing system for the treatment of IDD comprises one or more sgRNAs targeting exon 9 of eTGFBR1. In some embodiments, the CRISPR gene-editing system for the treatment of IDD comprises one or more sgRNAs targeting exon 10 of eTGFBR1. In some embodiments, the CRISPR gene-editing system for the treatment of IDD comprises one or more sgRNAs targeting exon 11 of eTGFBR1. In some embodiments, the CRISPR gene-editing system for the treatment of IDD comprises one or more sgRNAs targeting exon 12 of eTGFBR1. In some embodiments, the CRISPR gene-editing system for the treatment of IDD comprising one or more sgRNAs targeting an exon of eTGFBR1 is delivered via one or more lipid nanoparticles (LNPs), the LNPs comprising an LNP system described herein, e.g., and without limitation, any one of LNP systems LNP001 to LNP240.

[0571] In some embodiments, the CRISPR gene-editing system for the treatment of IDD comprises one or more sgRNAs targeting exon 1 of fTGFBR1. In some embodiments, the CRISPR gene-editing system for the treatment of IDD comprises one or more sgRNAs targeting exon 2 of fTGFBR1. In some embodiments, the CRISPR gene-editing system for the treatment of IDD comprises one or more sgRNAs targeting exon 3 of fTGFBR1. In some embodiments, the CRISPR gene-editing system for the treatment of IDD comprises one or more sgRNAs targeting exon 4 of fTGFBR1. In some embodiments, the CRISPR gene-editing system for the treatment of IDD comprises one or more sgRNAs targeting exon 5 of fTGFBR1. In some embodiments, the CRISPR gene-editing system for the treatment of IDD comprises one or more sgRNAs targeting exon 6 of fTGFBR1. In some embodiments, the CRISPR gene-editing system for the treatment of IDD comprises one or more sgRNAs targeting exon 7 of fTGFBR1. In some embodiments, the CRISPR gene-editing system for the treatment of IDD comprises one or more sgRNAs targeting exon 8 of fTGFBR1. In some embodiments, the CRISPR gene-editing system for the treatment of IDD comprises one or more sgRNAs targeting exon 9 of fTGFBR1. In some embodiments, the CRISPR gene-editing system for the treatment of IDD comprises one or more sgRNAs targeting exon 10 of fTGFBR1. In some embodiments, the CRISPR gene-editing system for the treatment of IDD comprises one or more sgRNAs targeting exon 11 of fTGFBR1. In some embodiments, the CRISPR gene-editing system for the treatment of IDD comprising one or more sgRNAs targeting an exon of fTGFBR1 is delivered via one or more lipid nanoparticles (LNPs), the LNPs comprising an LNP system described herein, e.g., and without limitation, any one of LNP systems LNP001 to LNP240.

[0572] In some embodiments, the CRISPR gene-editing system for the treatment of IDD comprises one or more sgRNAs targeting TGFBR2. In some embodiments, the CRISPR gene-editing system for the treatment of IDD comprises one or more sgRNAs targeting hTGFBR2. In some embodiments, the CRISPR gene-editing system for the treatment of IDD comprises one or more sgRNAs targeting cTGFBR2. In some embodiments, the CRISPR gene-editing system for the treatment of IDD comprises one or more sgRNAs targeting eTGFBR2. In some embodiments, the CRISPR gene-editing system for the treatment of IDD comprises one or more sgRNAs targeting fTGFBR2. In some embodiments, the CRISPR gene-editing system for the treatment of IDD comprising one or more sgRNAs targeting an exon of TGFBR2 is delivered via one or more lipid nanoparticles (LNPs), the LNPs comprising an LNP system described herein, e.g., and without limitation, any one of LNP systems LNP001 to LNP240.

[0573] In some embodiments, the CRISPR gene-editing system for the treatment of IDD comprises one or more sgRNAs targeting exon 1 of hTGFBR2. In some embodiments, the CRISPR gene-editing system for the treatment of IDD comprises one or more sgRNAs targeting exon 2 of hTGFBR2. In some embodiments, the CRISPR gene-editing system for the treatment of IDD comprises one or more sgRNAs targeting exon 3 of hTGFBR2. In some embodiments, the CRISPR gene-editing system for the treatment of IDD comprises one or more sgRNAs targeting exon 4 of hTGFBR2. In some embodiments, the CRISPR gene-editing system for the treatment of IDD comprises one or more sgRNAs targeting exon 5 of hTGFBR2. In some embodiments, the CRISPR gene-editing system for the treatment of IDD comprises one or more sgRNAs targeting exon 6 of hTGFBR2. In some embodiments, the CRISPR gene-editing system for the treatment of IDD comprises one or more sgRNAs targeting exon 7 of hTGFBR2. In some embodiments, the CRISPR gene-editing system for the treatment of IDD comprises one or more sgRNAs targeting exon 8 of hTGFBR2. In some embodiments, the CRISPR gene-editing system for the treatment of IDD comprises one or more sgRNAs targeting exon 9 of hTGFBR2. In some embodiments, the CRISPR gene-editing system for the treatment of IDD comprising one or more sgRNAs targeting an exon of hTGFBR2 is delivered via one or more lipid nanoparticles (LNPs), the LNPs comprising an LNP system described herein, e.g., and without limitation, any one of LNP systems LNP001 to LNP240.

[0574] In some embodiments, the CRISPR gene-editing system for the treatment of IDD comprises one or more sgRNAs targeting exon 1 of cTGFBR2. In some embodiments, the CRISPR gene-editing system for the treatment of IDD comprises one or more sgRNAs targeting exon 2 of cTGFBR2. In some embodiments, the CRISPR gene-editing system for the treatment of IDD comprises one or more sgRNAs targeting exon 3 of cTGFBR2. In some embodiments, the CRISPR gene-editing system for the treatment of IDD comprises one or more sgRNAs targeting exon 4 of cTGFBR2. In some embodiments, the CRISPR gene-editing system for the treatment of IDD comprises one or more sgRNAs targeting exon 5 of cTGFBR2. In some embodiments, the CRISPR gene-editing system for the treatment of IDD comprises one or more sgRNAs targeting exon 6 of cTGFBR2. In some embodiments, the CRISPR gene-editing system for the treatment of IDD comprises one or more sgRNAs targeting exon 7 of cTGFBR2. In some embodiments, the CRISPR gene-editing system for the treatment of IDD comprises one or more sgRNAs targeting exon 8 of cTGFBR2. In some embodiments, the CRISPR gene-editing system for the treatment of IDD comprising one or more sgRNAs targeting an exon of cTGFBR2 is delivered via one or more lipid nanoparticles (LNPs), the LNPs comprising an LNP system described herein, e.g., and without limitation, any one of LNP systems LNP001 to LNP240.

[0575] In some embodiments, the CRISPR gene-editing system for the treatment of IDD comprises one or more sgRNAs targeting exon 1 of eTGFBR2. In some embodiments, the CRISPR gene-editing system for the treatment of IDD comprises one or more sgRNAs targeting exon 2 of eTGFBR2. In some embodiments, the CRISPR gene-editing system for the treatment of IDD comprises one or more sgRNAs targeting exon 3 of eTGFBR2. In some embodiments, the CRISPR gene-editing system for the treatment of IDD comprises one or more sgRNAs targeting exon 4 of eTGFBR2. In some embodiments, the CRISPR gene-editing system for the treatment of IDD comprises one or more sgRNAs targeting exon 5 of eTGFBR2. In some embodiments, the CRISPR gene-editing system for the treatment of IDD comprises one or more sgRNAs targeting exon 6 of eTGFBR2. In some embodiments, the CRISPR gene-editing system for the treatment of IDD comprises one or more sgRNAs targeting exon 7 of eTGFBR2. In some embodiments, the CRISPR gene-editing system for the treatment of IDD comprises one or more sgRNAs targeting exon 8 of eTGFBR2. In some embodiments, the CRISPR gene-editing system for the treatment of IDD comprises one or more sgRNAs targeting exon 9 of eTGFBR2. In some embodiments, the CRISPR gene-editing system for the treatment of IDD comprises one or more sgRNAs targeting exon 10 of eTGFBR2. In some embodiments, the CRISPR gene-editing system for the treatment of IDD comprising one or more sgRNAs targeting an exon of eTGFBR2 is delivered via one or more lipid nanoparticles (LNPs), the LNPs comprising an LNP system described herein, e.g., and without limitation, any one of LNP systems LNP001 to LNP240.

[0576] In some embodiments, the CRISPR gene-editing system for the treatment of IDD comprises one or more sgRNAs targeting exon 1 of fTGFBR2. In some embodiments, the CRISPR gene-editing system for the treatment of IDD comprises one or more sgRNAs targeting exon 2 of fTGFBR2. In some embodiments, the CRISPR gene-editing system for the treatment of IDD comprises one or more sgRNAs targeting exon 3 of fTGFBR2. In some embodiments, the CRISPR gene-editing system for the treatment of IDD comprises one or more sgRNAs targeting exon 4 of fTGFBR2. In some embodiments, the CRISPR gene-editing system for the treatment of IDD comprises one or more sgRNAs targeting exon 5 of fTGFBR2. In some embodiments, the CRISPR gene-editing system for the treatment of IDD comprises one or more sgRNAs targeting exon 6 of fTGFBR2. In some embodiments, the CRISPR gene-editing system for the treatment of IDD comprises one or more sgRNAs targeting exon 7 of fTGFBR2. In some embodiments, the CRISPR gene-editing system for the treatment of IDD comprises one or more sgRNAs targeting exon 8 of fTGFBR2. In some embodiments, the CRISPR gene-editing system for the treatment of IDD comprising one or more sgRNAs targeting an exon of fTGFBR2 is delivered via one or more lipid nanoparticles (LNPs), the LNPs comprising an LNP system described herein, e.g., and without limitation, any one of LNP systems LNP001 to LNP240.

[0577] In some embodiments, the CRISPR gene-editing system for the treatment of IDD comprises one or more sgRNAs targeting IL6R. In some embodiments, the CRISPR gene-editing system for the treatment of IDD comprises one or more sgRNAs targeting hIL6R. In some embodiments, the CRISPR gene-editing system for the treatment of IDD comprises one or more sgRNAs targeting cIL6R. In some embodiments, the CRISPR gene-editing system for the treatment of IDD comprises one or more sgRNAs targeting eIL6R. In some embodiments, the CRISPR gene-editing system for the treatment of IDD comprises one or more sgRNAs targeting fIL6R. In some embodiments, the CRISPR gene-editing system for the treatment of IDD comprising one or more sgRNAs targeting an exon of IL6R is delivered via one or more lipid nanoparticles (LNPs), the LNPs comprising an LNP system described herein, e.g., and without limitation, any one of LNP systems LNP001 to LNP240.

[0578] In some embodiments, the CRISPR gene-editing system for the treatment of IDD comprises one or more sgRNAs targeting exon 1 of hIL6R. In some embodiments, the CRISPR gene-editing system for the treatment of IDD comprises one or more sgRNAs targeting exon 2 of hIL6R. In some embodiments, the CRISPR gene-editing system for the treatment of IDD comprises one or more sgRNAs targeting exon 3 of hIL6R. In some embodiments, the CRISPR gene-editing system for the treatment of IDD comprises one or more sgRNAs targeting exon 4 of hIL6R. In some embodiments, the CRISPR gene-editing system for the treatment of IDD comprises one or more sgRNAs targeting exon 5 of hIL6R. In some embodiments, the CRISPR gene-editing system for the treatment of IDD comprises one or more sgRNAs targeting exon 6 of hIL6R. In some embodiments, the CRISPR gene-editing system for the treatment of IDD comprises one or more sgRNAs targeting exon 7 of hIL6R. In some embodiments, the CRISPR gene-editing system for the treatment of IDD comprises one or more sgRNAs targeting exon 8 of hIL6R. In some embodiments, the CRISPR gene-editing system for the treatment of IDD comprises one or more sgRNAs targeting exon 9 of hIL6R. In some embodiments, the CRISPR gene-editing system for the treatment of IDD comprises one or more sgRNAs targeting exon 10 of hIL6R. In some embodiments, the CRISPR gene-editing system for the treatment of IDD comprises one or more sgRNAs targeting exon 11 of hIL6R In some embodiments, the CRISPR gene-editing system for the treatment of IDD comprises one or more sgRNAs targeting exon 12 of hIL6R. In some embodiments, the CRISPR gene-editing system for the treatment of IDD comprises one or more sgRNAs targeting exon 13 of hIL6R. In some embodiments, the CRISPR gene-editing system for the treatment of IDD comprises one or more sgRNAs targeting exon 14 of hIL6R. In some embodiments, the CRISPR gene-editing system for the treatment of IDD comprises one or more sgRNAs targeting exon 15 of hIL6R. In some embodiments, the CRISPR gene-editing system for the treatment of IDD comprising one or more sgRNAs targeting an exon of hIL6R is delivered via one or more lipid nanoparticles (LNPs), the LNPs comprising an LNP system described herein, e.g., and without limitation, any one of LNP systems LNP001 to LNP240.

[0579] In some embodiments, the CRISPR gene-editing system for the treatment of IDD comprises one or more sgRNAs targeting exon 1 of cIL6R. In some embodiments, the CRISPR gene-editing system for the treatment of IDD comprises one or more sgRNAs targeting exon 2 of cIL6R. In some embodiments, the CRISPR gene-editing system for the treatment of IDD comprises one or more sgRNAs targeting exon 3 of cIL6R. In some embodiments, the CRISPR gene-editing system for the treatment of IDD comprises one or more sgRNAs targeting exon 4 of cIL6R. In some embodiments, the CRISPR gene-editing system for the treatment of IDD comprises one or more sgRNAs targeting exon 5 of cIL6R. In some embodiments, the CRISPR gene-editing system for the treatment of IDD comprises one or more sgRNAs targeting exon 6 of cIL6R. In some embodiments, the CRISPR gene-editing system for the treatment of IDD comprises one or more sgRNAs targeting exon 7 of cIL6R. In some embodiments, the CRISPR gene-editing system for the treatment of IDD comprises one or more sgRNAs targeting exon 8 of cIL6R. In some embodiments, the CRISPR gene-editing system for the treatment of IDD comprises one or more sgRNAs targeting exon 9 of cIL6R. In some embodiments, the CRISPR gene-editing system for the treatment of IDD comprises one or more sgRNAs targeting exon 10 of cIL6R. In some embodiments, the CRISPR gene-editing system for the treatment of IDD comprises one or more sgRNAs targeting exon 11 of cIL6R. In some embodiments, the CRISPR gene-editing system for the treatment of IDD comprises one or more sgRNAs targeting exon 12 of cIL6R. In some embodiments, the CRISPR gene-editing system for the treatment of IDD comprises one or more sgRNAs targeting exon 13 of cIL6R. In some embodiments, the CRISPR gene-editing system for the treatment of IDD comprising one or more sgRNAs targeting an exon of cIL6R is delivered via one or more lipid nanoparticles (LNPs), the LNPs comprising an LNP system described herein, e.g., and without limitation, any one of LNP systems LNP001 to LNP240.

[0580] In some embodiments, the CRISPR gene-editing system for the treatment of IDD comprises one or more sgRNAs targeting exon 1 of eIL6R. In some embodiments, the CRISPR gene-editing system for the treatment of IDD comprises one or more sgRNAs targeting exon 2 of eIL6R. In some embodiments, the CRISPR gene-editing system for the treatment of IDD comprises one or more sgRNAs targeting exon 3 of eIL6R. In some embodiments, the CRISPR gene-editing system for the treatment of IDD comprises one or more sgRNAs targeting exon 4 of eIL6R. In some embodiments, the CRISPR gene-editing system for the treatment of IDD comprises one or more sgRNAs targeting exon 5 of eIL6R. In some embodiments, the CRISPR gene-editing system for the treatment of IDD comprises one or more sgRNAs targeting exon 6 of eIL6R. In some embodiments, the CRISPR gene-editing system for the treatment of IDD comprises one or more sgRNAs targeting exon 7 of eIL6R. In some embodiments, the CRISPR gene-editing system for the treatment of IDD comprises one or more sgRNAs targeting exon 8 of eIL6R. In some embodiments, the CRISPR gene-editing system for the treatment of IDD comprises one or more sgRNAs targeting exon 9 of eIL6R. In some embodiments, the CRISPR gene-editing system for the treatment of IDD comprises one or more sgRNAs targeting exon 10 of eIL6R. In some embodiments, the CRISPR gene-editing system for the treatment of IDD comprises one or more sgRNAs targeting exon 11 of eIL6R. In some embodiments, the CRISPR gene-editing system for the treatment of IDD comprising one or more sgRNAs targeting an exon of eIL6R is delivered via one or more lipid nanoparticles (LNPs), the LNPs comprising an LNP system described herein, e.g., and without limitation, any one of LNP systems LNP001 to LNP240.

[0581] In some embodiments, the CRISPR gene-editing system for the treatment of IDD comprises one or more sgRNAs targeting exon 1 of fIL6R. In some embodiments, the CRISPR gene-editing system for the treatment of IDD comprises one or more sgRNAs targeting exon 2 of fIL6R. In some embodiments, the CRISPR gene-editing system for the treatment of IDD comprises one or more sgRNAs targeting exon 3 of fIL6R. In some embodiments, the CRISPR gene-editing system for the treatment of IDD comprises one or more sgRNAs targeting exon 4 of fIL6R. In some embodiments, the CRISPR gene-editing system for the treatment of IDD comprises one or more sgRNAs targeting exon 5 of fIL6R. In some embodiments, the CRISPR gene-editing system for the treatment of IDD comprises one or more sgRNAs targeting exon 6 of fIL6R. In some embodiments, the CRISPR gene-editing system for the treatment of IDD comprises one or more sgRNAs targeting exon 7 of fIL6R. In some embodiments, the CRISPR gene-editing system for the treatment of IDD comprises one or more sgRNAs targeting exon 8 of fIL6R. In some embodiments, the CRISPR gene-editing system for the treatment of IDD comprises one or more sgRNAs targeting exon 9 of fIL6R. In some embodiments, the CRISPR gene-editing system for the treatment of IDD comprises one or more sgRNAs targeting exon 10 of fIL6R. In some embodiments, the CRISPR gene-editing system for the treatment of IDD comprising one or more sgRNAs targeting an exon of fIL6R is delivered via one or more lipid nanoparticles (LNPs), the LNPs comprising an LNP system described herein, e.g., and without limitation, any one of LNP systems LNP001 to LNP240.

[0582] In some embodiments, the CRISPR gene-editing system for the treatment of IDD comprises one or more sgRNAs targeting IL6ST. In some embodiments, the CRISPR gene-editing system for the treatment of IDD comprises one or more sgRNAs targeting hIL6ST. In some embodiments, the CRISPR gene-editing system for the treatment of IDD comprises one or more sgRNAs targeting cIL6ST. In some embodiments, the CRISPR gene-editing system for the treatment of IDD comprises one or more sgRNAs targeting eIL6ST. In some embodiments, the CRISPR gene-editing system for the treatment of IDD comprises one or more sgRNAs targeting fIL6ST. In some embodiments, the CRISPR gene-editing system for the treatment of IDD comprising one or more sgRNAs targeting an exon of IL6ST is delivered via one or more lipid nanoparticles (LNPs), the LNPs comprising an LNP system described herein, e.g., and without limitation, any one of LNP systems LNP001 to LNP240.

[0583] In some embodiments, the CRISPR gene-editing system for the treatment of IDD comprises one or more sgRNAs targeting exon 1 of hIL6ST. In some embodiments, the CRISPR gene-editing system for the treatment of IDD comprises one or more sgRNAs targeting exon 2 of hIL6ST. In some embodiments, the CRISPR gene-editing system for the treatment of IDD comprises one or more sgRNAs targeting exon 3 of hIL6ST. In some embodiments, the CRISPR gene-editing system for the treatment of IDD comprises one or more sgRNAs targeting exon 4 of hIL6ST. In some embodiments, the CRISPR gene-editing system for the treatment of IDD comprises one or more sgRNAs targeting exon 5 of hIL6ST. In some embodiments, the CRISPR gene-editing system for the treatment of IDD comprises one or more sgRNAs targeting exon 6 of hIL6ST. In some embodiments, the CRISPR gene-editing system for the treatment of IDD comprises one or more sgRNAs targeting exon 7 of hIL6ST. In some embodiments, the CRISPR gene-editing system for the treatment of IDD comprises one or more sgRNAs targeting exon 8 of hIL6ST. In some embodiments, the CRISPR gene-editing system for the treatment of IDD comprises one or more sgRNAs targeting exon 9 of hIL6ST. In some embodiments, the CRISPR gene-editing system for the treatment of IDD comprises one or more sgRNAs targeting exon 10 of hIL6ST. In some embodiments, the CRISPR gene-editing system for the treatment of IDD comprises one or more sgRNAs targeting exon 11 of hIL6ST. In some embodiments, the CRISPR gene-editing system for the treatment of IDD comprises one or more sgRNAs targeting exon 12 of hIL6ST. In some embodiments, the CRISPR gene-editing system for the treatment of IDD comprises one or more sgRNAs targeting exon 13 of hIL6ST. In some embodiments, the CRISPR gene-editing system for the treatment of IDD comprises one or more sgRNAs targeting exon 14 of hIL6ST. In some embodiments, the CRISPR gene-editing system for the treatment of IDD comprises one or more sgRNAs targeting exon 15 of hIL6ST. In some embodiments, the CRISPR gene-editing system for the treatment of IDD comprises one or more sgRNAs targeting exon 16 of hIL6ST. In some embodiments, the CRISPR gene-editing system for the treatment of IDD comprises one or more sgRNAs targeting exon 17 of hIL6ST. In some embodiments, the CRISPR gene-editing system for the treatment of IDD comprises one or more sgRNAs targeting exon 18 of hIL6ST. In some embodiments, the CRISPR gene-editing system for the treatment of IDD comprises one or more sgRNAs targeting exon 19 of hIL6ST. In some embodiments, the CRISPR gene-editing system for the treatment of IDD comprising one or more sgRNAs targeting an exon of hIL6ST is delivered via one or more lipid nanoparticles (LNPs), the LNPs comprising an LNP system described herein, e.g., and without limitation, any one of LNP systems LNP001 to LNP240.

[0584] In some embodiments, the CRISPR gene-editing system for the treatment of IDD comprises one or more sgRNAs targeting exon 1 of cIL6ST. In some embodiments, the CRISPR gene-editing system for the treatment of IDD comprises one or more sgRNAs targeting exon 2 of cIL6ST. In some embodiments, the CRISPR gene-editing system for the treatment of IDD comprises one or more sgRNAs targeting exon 3 of cIL6ST. In some embodiments, the CRISPR gene-editing system for the treatment of IDD comprises one or more sgRNAs targeting exon 4 of cIL6ST. In some embodiments, the CRISPR gene-editing system for the treatment of IDD comprises one or more sgRNAs targeting exon 5 of cIL6ST. In some embodiments, the CRISPR gene-editing system for the treatment of IDD comprises one or more sgRNAs targeting exon 6 of cIL6ST. In some embodiments, the CRISPR gene-editing system for the treatment of IDD comprises one or more sgRNAs targeting exon 7 of cIL6ST. In some embodiments, the CRISPR gene-editing system for the treatment of IDD comprises one or more sgRNAs targeting exon 8 of cIL6ST. In some embodiments, the CRISPR gene-editing system for the treatment of IDD comprises one or more sgRNAs targeting exon 9 of cIL6ST. In some embodiments, the CRISPR gene-editing system for the treatment of IDD comprises one or more sgRNAs targeting exon 10 of cIL6ST. In some embodiments, the CRISPR gene-editing system for the treatment of IDD comprises one or more sgRNAs targeting exon 11 of cIL6ST In some embodiments, the CRISPR gene-editing system for the treatment of IDD comprises one or more sgRNAs targeting exon 12 of cIL6ST. In some embodiments, the CRISPR gene-editing system for the treatment of IDD comprises one or more sgRNAs targeting exon 13 of cIL6ST. In some embodiments, the CRISPR gene-editing system for the treatment of IDD comprises one or more sgRNAs targeting exon 14 of cIL6ST. In some embodiments, the CRISPR gene-editing system for the treatment of IDD comprises one or more sgRNAs targeting exon 15 of cIL6ST. In some embodiments, the CRISPR gene-editing system for the treatment of IDD comprises one or more sgRNAs targeting exon 16 of cIL6ST. In some embodiments, the CRISPR gene-editing system for the treatment of IDD comprises one or more sgRNAs targeting exon 17 of cIL6ST. In some embodiments, the CRISPR gene-editing system for the treatment of IDD comprises one or more sgRNAs targeting exon 18 of cIL6ST. In some embodiments, the CRISPR gene-editing system for the treatment of IDD comprising one or more sgRNAs targeting an exon of cIL6ST is delivered via one or more lipid nanoparticles (LNPs), the LNPs comprising an LNP system described herein, e.g., and without limitation, any one of LNP systems LNP001 to LNP240.

[0585] In some embodiments, the CRISPR gene-editing system for the treatment of IDD comprises one or more sgRNAs targeting exon 1 of eIL6ST. In some embodiments, the CRISPR gene-editing system for the treatment of IDD comprises one or more sgRNAs targeting exon 2 of eIL6ST. In some embodiments, the CRISPR gene-editing system for the treatment of IDD comprises one or more sgRNAs targeting exon 3 of eIL6ST. In some embodiments, the CRISPR gene-editing system for the treatment of IDD comprises one or more sgRNAs targeting exon 4 of eIL6ST. In some embodiments, the CRISPR gene-editing system for the treatment of IDD comprises one or more sgRNAs targeting exon 5 of eIL6ST. In some embodiments, the CRISPR gene-editing system for the treatment of IDD comprises one or more sgRNAs targeting exon 6 of eIL6ST. In some embodiments, the CRISPR gene-editing system for the treatment of IDD comprises one or more sgRNAs targeting exon 7 of eIL6ST. In some embodiments, the CRISPR gene-editing system for the treatment of IDD comprises one or more sgRNAs targeting exon 8 of eIL6ST. In some embodiments, the CRISPR gene-editing system for the treatment of IDD comprises one or more sgRNAs targeting exon 9 of eIL6ST. In some embodiments, the CRISPR gene-editing system for the treatment of IDD comprises one or more sgRNAs targeting exon 10 of eIL6ST. In some embodiments, the CRISPR gene-editing system for the treatment of IDD comprises one or more sgRNAs targeting exon 11 of eIL6ST In some embodiments, the CRISPR gene-editing system for the treatment of IDD comprises one or more sgRNAs targeting exon 12 of eIL6ST. In some embodiments, the CRISPR gene-editing system for the treatment of IDD comprises one or more sgRNAs targeting exon 13 of eIL6ST. In some embodiments, the CRISPR gene-editing system for the treatment of IDD comprises one or more sgRNAs targeting exon 14 of eIL6ST. In some embodiments, the CRISPR gene-editing system for the treatment of IDD comprises one or more sgRNAs targeting exon 15 of eIL6ST. In some embodiments, the CRISPR gene-editing system for the treatment of IDD comprises one or more sgRNAs targeting exon 16 of eIL6ST. In some embodiments, the CRISPR gene-editing system for the treatment of IDD comprises one or more sgRNAs targeting exon 17 of eIL6ST. In some embodiments, the CRISPR gene-editing system for the treatment of IDD comprises one or more sgRNAs targeting exon 18 of eIL6ST. In some embodiments, the CRISPR gene-editing system for the treatment of IDD comprising one or more sgRNAs targeting an exon of eIL6ST is delivered via one or more lipid nanoparticles (LNPs), the LNPs comprising an LNP system described herein, e.g., and without limitation, any one of LNP systems LNP001 to LNP240.

[0586] In some embodiments, the CRISPR gene-editing system for the treatment of IDD comprises one or more sgRNAs targeting exon 1 of fIL6ST. In some embodiments, the CRISPR gene-editing system for the treatment of IDD comprises one or more sgRNAs targeting exon 2 of fIL6ST. In some embodiments, the CRISPR gene-editing system for the treatment of IDD comprises one or more sgRNAs targeting exon 3 of fIL6ST. In some embodiments, the CRISPR gene-editing system for the treatment of IDD comprises one or more sgRNAs targeting exon 4 of fIL6ST. In some embodiments, the CRISPR gene-editing system for the treatment of IDD comprises one or more sgRNAs targeting exon 5 of fIL6ST. In some embodiments, the CRISPR gene-editing system for the treatment of IDD comprises one or more sgRNAs targeting exon 6 of fIL6ST. In some embodiments, the CRISPR gene-editing system for the treatment of IDD comprises one or more sgRNAs targeting exon 7 of fIL6ST. In some embodiments, the CRISPR gene-editing system for the treatment of IDD comprises one or more sgRNAs targeting exon 8 of fIL6ST. In some embodiments, the CRISPR gene-editing system for the treatment of IDD comprises one or more sgRNAs targeting exon 9 of fIL6ST. In some embodiments, the CRISPR gene-editing system for the treatment of IDD comprises one or more sgRNAs targeting exon 10 of fIL6ST. In some embodiments, the CRISPR gene-editing system for the treatment of IDD comprises one or more sgRNAs targeting exon 11 of fIL6ST In some embodiments, the CRISPR gene-editing system for the treatment of IDD comprises one or more sgRNAs targeting exon 12 of fIL6ST. In some embodiments, the CRISPR gene-editing system for the treatment of IDD comprises one or more sgRNAs targeting exon 13 of fIL6ST. In some embodiments, the CRISPR gene-editing system for the treatment of IDD comprises one or more sgRNAs targeting exon 14 of fIL6ST. In some embodiments, the CRISPR gene-editing system for the treatment of IDD comprises one or more sgRNAs targeting exon 15 of fIL6ST. In some embodiments, the CRISPR gene-editing system for the treatment of IDD comprises one or more sgRNAs targeting exon 16 of fIL6ST. In some embodiments, the CRISPR gene-editing system for the treatment of IDD comprises one or more sgRNAs targeting exon 17 of fIL6ST. In some embodiments, the CRISPR gene-editing system for the treatment of IDD comprises one or more sgRNAs targeting exon 18 of fIL6ST. In some embodiments, the CRISPR gene-editing system for the treatment of IDD comprises one or more sgRNAs targeting exon 19 of fIL6ST. In some embodiments, the CRISPR gene-editing system for the treatment of IDD comprises one or more sgRNAs targeting exon 20 of fIL6ST. In some embodiments, the CRISPR gene-editing system for the treatment of IDD comprising one or more sgRNAs targeting an exon of fIL6ST is delivered via one or more lipid nanoparticles (LNPs), the LNPs comprising an LNP system described herein, e.g., and without limitation, any one of LNP systems LNP001 to LNP240.

[0587] In some embodiments, the CRISPR gene-editing system for the treatment of IDD comprises one or more sgRNAs targeting TNFRSF1A. In some embodiments, the CRISPR gene-editing system for the treatment of IDD comprises one or more sgRNAs targeting hTNFRSF1A. In some embodiments, the CRISPR gene-editing system for the treatment of IDD comprises one or more sgRNAs targeting cTNFRSF1A. In some embodiments, the CRISPR gene-editing system for the treatment of IDD comprises one or more sgRNAs targeting eTNFRSF1A. In some embodiments, the CRISPR gene-editing system for the treatment of IDD comprises one or more sgRNAs targeting fTNFRSF1A. In some embodiments, the CRISPR gene-editing system for the treatment of IDD comprising one or more sgRNAs targeting an exon of TNFRSF1A is delivered via one or more lipid nanoparticles (LNPs), the LNPs comprising an LNP system described herein, e.g., and without limitation, any one of LNP systems LNP001 to LNP240.

[0588] In some embodiments, the CRISPR gene-editing system for the treatment of IDD comprises one or more sgRNAs targeting exon 1 of hTNFRSF1A. In some embodiments, the CRISPR gene-editing system for the treatment of IDD comprises one or more sgRNAs targeting exon 2 of hTNFRSF1A. In some embodiments, the CRISPR gene-editing system for the treatment of IDD comprises one or more sgRNAs targeting exon 3 of hTNFRSF1A. In some embodiments, the CRISPR gene-editing system for the treatment of IDD comprises one or more sgRNAs targeting exon 4 of hTNFRSF1A. In some embodiments, the CRISPR gene-editing system for the treatment of IDD comprises one or more sgRNAs targeting exon 5 of hTNFRSF1A. In some embodiments, the CRISPR gene-editing system for the treatment of IDD comprises one or more sgRNAs targeting exon 6 of hTNFRSF1A. In some embodiments, the CRISPR gene-editing system for the treatment of IDD comprises one or more sgRNAs targeting exon 7 of hTNFRSF1A. In some embodiments, the CRISPR gene-editing system for the treatment of IDD comprises one or more sgRNAs targeting exon 8 of hTNFRSF1A. In some embodiments, the CRISPR gene-editing system for the treatment of IDD comprises one or more sgRNAs targeting exon 9 of hTNFRSF1A. In some embodiments, the CRISPR gene-editing system for the treatment of IDD comprises one or more sgRNAs targeting exon 10 of hTNFRSF1A. In some embodiments, the CRISPR gene-editing system for the treatment of IDD comprises one or more sgRNAs targeting exon 11 of hTNFRSF1A. In some embodiments, the CRISPR gene-editing system for the treatment of IDD comprising one or more sgRNAs targeting an exon of hTNFRSF1A is delivered via one or more lipid nanoparticles (LNPs), the LNPs comprising an LNP system described herein, e.g., and without limitation, any one of LNP systems LNP001 to LNP240.

[0589] In some embodiments, the CRISPR gene-editing system for the treatment of IDD comprises one or more sgRNAs targeting exon 1 of cTNFRSF1A. In some embodiments, the CRISPR gene-editing system for the treatment of IDD comprises one or more sgRNAs targeting exon 2 of cTNFRSF1A. In some embodiments, the CRISPR gene-editing system for the treatment of IDD comprises one or more sgRNAs targeting exon 3 of cTNFRSF1A. In some embodiments, the CRISPR gene-editing system for the treatment of IDD comprises one or more sgRNAs targeting exon 4 of cTNFRSF1A. In some embodiments, the CRISPR gene-editing system for the treatment of IDD comprises one or more sgRNAs targeting exon 5 of cTNFRSF1A. In some embodiments, the CRISPR gene-editing system for the treatment of IDD comprises one or more sgRNAs targeting exon 6 of cTNFRSF1A. In some embodiments, the CRISPR gene-editing system for the treatment of IDD comprises one or more sgRNAs targeting exon 7 of cTNFRSF1A. In some embodiments, the CRISPR gene-editing system for the treatment of IDD comprises one or more sgRNAs targeting exon 8 of cTNFRSF1A. In some embodiments, the CRISPR gene-editing system for the treatment of IDD comprises one or more sgRNAs targeting exon 9 of cTNFRSF1A. In some embodiments, the CRISPR gene-editing system for the treatment of IDD comprises one or more sgRNAs targeting exon 10 of cTNFRSF1A. In some embodiments, the CRISPR gene-editing system for the treatment of IDD comprises one or more sgRNAs targeting exon 11 of cTNFRSF1A. In some embodiments, the CRISPR gene-editing system for the treatment of IDD comprising one or more sgRNAs targeting an exon of cTNFRSF1A is delivered via one or more lipid nanoparticles (LNPs), the LNPs comprising an LNP system described herein, e.g., and without limitation, any one of LNP systems LNP001 to LNP240.

[0590] In some embodiments, the CRISPR gene-editing system for the treatment of IDD comprises one or more sgRNAs targeting exon 1 of eTNFRSF1A. In some embodiments, the CRISPR gene-editing system for the treatment of IDD comprises one or more sgRNAs targeting exon 2 of eTNFRSF1A. In some embodiments, the CRISPR gene-editing system for the treatment of IDD comprises one or more sgRNAs targeting exon 3 of eTNFRSF1A. In some embodiments, the CRISPR gene-editing system for the treatment of IDD comprises one or more sgRNAs targeting exon 4 of eTNFRSF1A. In some embodiments, the CRISPR gene-editing system for the treatment of IDD comprises one or more sgRNAs targeting exon 5 of eTNFRSF1A. In some embodiments, the CRISPR gene-editing system for the treatment of IDD comprises one or more sgRNAs targeting exon 6 of eTNFRSF1A. In some embodiments, the CRISPR gene-editing system for the treatment of IDD comprises one or more sgRNAs targeting exon 7 of eTNFRSF1A. In some embodiments, the CRISPR gene-editing system for the treatment of IDD comprises one or more sgRNAs targeting exon 8 of eTNFRSF1A. In some embodiments, the CRISPR gene-editing system for the treatment of IDD comprises one or more sgRNAs targeting exon 9 of eTNFRSF1A. In some embodiments, the CRISPR gene-editing system for the treatment of IDD comprises one or more sgRNAs targeting exon 10 of eTNFRSF1A. In some embodiments, the CRISPR gene-editing system for the treatment of IDD comprising one or more sgRNAs targeting an exon of eTNFRSF1A is delivered via one or more lipid nanoparticles (LNPs), the LNPs comprising an LNP system described herein, e.g., and without limitation, any one of LNP systems LNP001 to LNP240.

[0591] In some embodiments, the CRISPR gene-editing system for the treatment of IDD comprises one or more sgRNAs targeting exon 1 of fTNFRSF1A. In some embodiments, the CRISPR gene-editing system for the treatment of IDD comprises one or more sgRNAs targeting exon 2 of fTNFRSF1A. In some embodiments, the CRISPR gene-editing system for the treatment of IDD comprises one or more sgRNAs targeting exon 3 of fTNFRSF1A. In some embodiments, the CRISPR gene-editing system for the treatment of IDD comprises one or more sgRNAs targeting exon 4 of fTNFRSF1A. In some embodiments, the CRISPR gene-editing system for the treatment of IDD comprises one or more sgRNAs targeting exon 5 of fTNFRSF1A. In some embodiments, the CRISPR gene-editing system for the treatment of IDD comprises one or more sgRNAs targeting exon 6 of fTNFRSF1A. In some embodiments, the CRISPR gene-editing system for the treatment of IDD comprises one or more sgRNAs targeting exon 7 of fTNFRSF1A. In some embodiments, the CRISPR gene-editing system for the treatment of IDD comprises one or more sgRNAs targeting exon 8 of fTNFRSF1A. In some embodiments, the CRISPR gene-editing system for the treatment of IDD comprises one or more sgRNAs targeting exon 9 of fTNFRSF1A. In some embodiments, the CRISPR gene-editing system for the treatment of IDD comprises one or more sgRNAs targeting exon 10 of fTNFRSF1A. In some embodiments, the CRISPR gene-editing system for the treatment of IDD comprising one or more sgRNAs targeting an exon of fTNFRSF1A is delivered via one or more lipid nanoparticles (LNPs), the LNPs comprising an LNP system described herein, e.g., and without limitation, any one of LNP systems LNP001 to LNP240.

[0592] In some embodiments, the CRISPR gene-editing system for the treatment of IDD comprises one or more sgRNAs targeting TNFRSF1B. In some embodiments, the CRISPR gene-editing system for the treatment of IDD comprises one or more sgRNAs targeting hTNFRSF1B. In some embodiments, the CRISPR gene-editing system for the treatment of IDD comprises one or more sgRNAs targeting cTNFRSF1B. In some embodiments, the CRISPR gene-editing system for the treatment of IDD comprises one or more sgRNAs targeting eTNFRSF1B. In some embodiments, the CRISPR gene-editing system for the treatment of IDD comprises one or more sgRNAs targeting fTNFRSF1B. In some embodiments, the CRISPR gene-editing system for the treatment of IDD comprising one or more sgRNAs targeting an exon of TNFRSF1B is delivered via one or more lipid nanoparticles (LNPs), the LNPs comprising an LNP system described herein, e.g., and without limitation, any one of LNP systems LNP001 to LNP240.

[0593] In some embodiments, the CRISPR gene-editing system for the treatment of IDD comprises one or more sgRNAs targeting exon 1 of hTNFRSF1B. In some embodiments, the CRISPR gene-editing system for the treatment of IDD comprises one or more sgRNAs targeting exon 2 of hTNFRSF1B. In some embodiments, the CRISPR gene-editing system for the treatment of IDD comprises one or more sgRNAs targeting exon 3 of hTNFRSF1B. In some embodiments, the CRISPR gene-editing system for the treatment of IDD comprises one or more sgRNAs targeting exon 4 of hTNFRSF1B. In some embodiments, the CRISPR gene-editing system for the treatment of IDD comprises one or more sgRNAs targeting exon 5 of hTNFRSF1B. In some embodiments, the CRISPR gene-editing system for the treatment of IDD comprises one or more sgRNAs targeting exon 6 of hTNFRSF1B. In some embodiments, the CRISPR gene-editing system for the treatment of IDD comprises one or more sgRNAs targeting exon 7 of hTNFRSF1B. In some embodiments, the CRISPR gene-editing system for the treatment of IDD comprises one or more sgRNAs targeting exon 8 of hTNFRSF1B. In some embodiments, the CRISPR gene-editing system for the treatment of IDD comprises one or more sgRNAs targeting exon 9 of hTNFRSF1B. In some embodiments, the CRISPR gene-editing system for the treatment of IDD comprises one or more sgRNAs targeting exon 10 of hTNFRSF1B. In some embodiments, the CRISPR gene-editing system for the treatment of IDD comprises one or more sgRNAs targeting exon 11 of hTNFRSF1B In some embodiments, the CRISPR gene-editing system for the treatment of IDD comprises one or more sgRNAs targeting exon 12 of hTNFRSF1B. In some embodiments, the CRISPR gene-editing system for the treatment of IDD comprises one or more sgRNAs targeting exon 13 of hTNFRSF1B. In some embodiments, the CRISPR gene-editing system for the treatment of IDD comprising one or more sgRNAs targeting an exon of hTNFRSF1B is delivered via one or more lipid nanoparticles (LNPs), the LNPs comprising an LNP system described herein, e.g., and without limitation, any one of LNP systems LNP001 to LNP240.

[0594] In some embodiments, the CRISPR gene-editing system for the treatment of IDD comprises one or more sgRNAs targeting exon 1 of cTNFRSF1B. In some embodiments, the CRISPR gene-editing system for the treatment of IDD comprises one or more sgRNAs targeting exon 2 of cTNFRSF1B. In some embodiments, the CRISPR gene-editing system for the treatment of IDD comprises one or more sgRNAs targeting exon 3 of cTNFRSF1B. In some embodiments, the CRISPR gene-editing system for the treatment of IDD comprises one or more sgRNAs targeting exon 4 of cTNFRSF1B. In some embodiments, the CRISPR gene-editing system for the treatment of IDD comprises one or more sgRNAs targeting exon 5 of cTNFRSF1B. In some embodiments, the CRISPR gene-editing system for the treatment of IDD comprises one or more sgRNAs targeting exon 6 of cTNFRSF1B. In some embodiments, the CRISPR gene-editing system for the treatment of IDD comprises one or more sgRNAs targeting exon 7 of cTNFRSF1B. In some embodiments, the CRISPR gene-editing system for the treatment of IDD comprises one or more sgRNAs targeting exon 8 of cTNFRSF1B. In some embodiments, the CRISPR gene-editing system for the treatment of IDD comprises one or more sgRNAs targeting exon 9 of cTNFRSF1B. In some embodiments, the CRISPR gene-editing system for the treatment of IDD comprises one or more sgRNAs targeting exon 10 of cTNFRSF1B. In some embodiments, the CRISPR gene-editing system for the treatment of IDD comprises one or more sgRNAs targeting exon 11 of cTNFRSF1B. In some embodiments, the CRISPR gene-editing system for the treatment of IDD comprising one or more sgRNAs targeting an exon of cTNFRSF1B is delivered via one or more lipid nanoparticles (LNPs), the LNPs comprising an LNP system described herein, e.g., and without limitation, any one of LNP systems LNP001 to LNP240.

[0595] In some embodiments, the CRISPR gene-editing system for the treatment of IDD comprises one or more sgRNAs targeting exon 1 of eTNFRSF1B. In some embodiments, the CRISPR gene-editing system for the treatment of IDD comprises one or more sgRNAs targeting exon 2 of eTNFRSF1B. In some embodiments, the CRISPR gene-editing system for the treatment of IDD comprises one or more sgRNAs targeting exon 3 of eTNFRSF1B. In some embodiments, the CRISPR gene-editing system for the treatment of IDD comprises one or more sgRNAs targeting exon 4 of eTNFRSF1B. In some embodiments, the CRISPR gene-editing system for the treatment of IDD comprises one or more sgRNAs targeting exon 5 of eTNFRSF1B. In some embodiments, the CRISPR gene-editing system for the treatment of IDD comprises one or more sgRNAs targeting exon 6 of eTNFRSF1B. In some embodiments, the CRISPR gene-editing system for the treatment of IDD comprises one or more sgRNAs targeting exon 7 of eTNFRSF1B. In some embodiments, the CRISPR gene-editing system for the treatment of IDD comprises one or more sgRNAs targeting exon 8 of eTNFRSF1B. In some embodiments, the CRISPR gene-editing system for the treatment of IDD comprises one or more sgRNAs targeting exon 9 of eTNFRSF1B. In some embodiments, the CRISPR gene-editing system for the treatment of IDD comprises one or more sgRNAs targeting exon 10 of eTNFRSF1B. In some embodiments, the CRISPR gene-editing system for the treatment of IDD comprises one or more sgRNAs targeting exon 11 of eTNFRSF1B. In some embodiments, the CRISPR gene-editing system for the treatment of IDD comprising one or more sgRNAs targeting an exon of eTNFRSF1B is delivered via one or more lipid nanoparticles (LNPs), the LNPs comprising an LNP system described herein, e.g., and without limitation, any one of LNP systems LNP001 to LNP240.

[0596] In some embodiments, the CRISPR gene-editing system for the treatment of IDD comprises one or more sgRNAs targeting exon 1 of fTNFRSF1B. In some embodiments, the CRISPR gene-editing system for the treatment of IDD comprises one or more sgRNAs targeting exon 2 of fTNFRSF1B. In some embodiments, the CRISPR gene-editing system for the treatment of IDD comprises one or more sgRNAs targeting exon 3 of fTNFRSF1B. In some embodiments, the CRISPR gene-editing system for the treatment of IDD comprises one or more sgRNAs targeting exon 4 of fTNFRSF1B. In some embodiments, the CRISPR gene-editing system for the treatment of IDD comprises one or more sgRNAs targeting exon 5 of fTNFRSF1B. In some embodiments, the CRISPR gene-editing system for the treatment of IDD comprises one or more sgRNAs targeting exon 6 of fTNFRSF1B. In some embodiments, the CRISPR gene-editing system for the treatment of IDD comprises one or more sgRNAs targeting exon 7 of fTNFRSF1B. In some embodiments, the CRISPR gene-editing system for the treatment of IDD comprises one or more sgRNAs targeting exon 8 of fTNFRSF1B. In some embodiments, the CRISPR gene-editing system for the treatment of IDD comprises one or more sgRNAs targeting exon 9 of fTNFRSF1B. In some embodiments, the CRISPR gene-editing system for the treatment of IDD comprises one or more sgRNAs targeting exon 10 of fTNFRSF1B. In some embodiments, the CRISPR gene-editing system for the treatment of IDD comprising one or more sgRNAs targeting an exon of fTNFRSF1B is delivered via one or more lipid nanoparticles (LNPs), the LNPs comprising an LNP system described herein, e.g., and without limitation, any one of LNP systems LNP001 to LNP240.

[0597] In some embodiments, the CRISPR gene-editing system for the treatment of IDD comprises one or more sgRNAs targeting TNFRSF3. In some embodiments, the CRISPR gene-editing system for the treatment of IDD comprises one or more sgRNAs targeting hTNFRSF3. In some embodiments, the CRISPR gene-editing system for the treatment of IDD comprises one or more sgRNAs targeting cTNFRSF3. In some embodiments, the CRISPR gene-editing system for the treatment of IDD comprises one or more sgRNAs targeting eTNFRSF3. In some embodiments, the CRISPR gene-editing system for the treatment of IDD comprises one or more sgRNAs targeting fTNFRSF3. In some embodiments, the CRISPR gene-editing system for the treatment of IDD comprising one or more sgRNAs targeting an exon of TNFRSF3 is delivered via one or more lipid nanoparticles (LNPs), the LNPs comprising an LNP system described herein, e.g., and without limitation, any one of LNP systems LNP001 to LNP240.

[0598] In some embodiments, the CRISPR gene-editing system for the treatment of IDD comprises one or more sgRNAs targeting exon 1 of hTNFRSF3. In some embodiments, the CRISPR gene-editing system for the treatment of IDD comprises one or more sgRNAs targeting exon 2 of hTNFRSF3. In some embodiments, the CRISPR gene-editing system for the treatment of IDD comprises one or more sgRNAs targeting exon 3 of hTNFRSF3. In some embodiments, the CRISPR gene-editing system for the treatment of IDD comprises one or more sgRNAs targeting exon 4 of hTNFRSF3. In some embodiments, the CRISPR gene-editing system for the treatment of IDD comprises one or more sgRNAs targeting exon 5 of hTNFRSF3. In some embodiments, the CRISPR gene-editing system for the treatment of IDD comprises one or more sgRNAs targeting exon 6 of hTNFRSF3. In some embodiments, the CRISPR gene-editing system for the treatment of IDD comprises one or more sgRNAs targeting exon 7 of hTNFRSF3. In some embodiments, the CRISPR gene-editing system for the treatment of IDD comprises one or more sgRNAs targeting exon 8 of hTNFRSF3. In some embodiments, the CRISPR gene-editing system for the treatment of IDD comprises one or more sgRNAs targeting exon 9 of hTNFRSF3. In some embodiments, the CRISPR gene-editing system for the treatment of IDD comprises one or more sgRNAs targeting exon 10 of hTNFRSF3. In some embodiments, the CRISPR gene-editing system for the treatment of IDD comprises one or more sgRNAs targeting exon 11 of hTNFRSF3. In some embodiments, the CRISPR gene-editing system for the treatment of IDD comprises one or more sgRNAs targeting exon 12 of hTNFRSF3. In some embodiments, the CRISPR gene-editing system for the treatment of IDD comprising one or more sgRNAs targeting an exon of hTNFRSF3 is delivered via one or more lipid nanoparticles (LNPs), the LNPs comprising an LNP system described herein, e.g., and without limitation, any one of LNP systems LNP001 to LNP240.

[0599] In some embodiments, the CRISPR gene-editing system for the treatment of IDD comprises one or more sgRNAs targeting exon 1 of cTNFRSF3. In some embodiments, the CRISPR gene-editing system for the treatment of IDD comprises one or more sgRNAs targeting exon 2 of cTNFRSF3. In some embodiments, the CRISPR gene-editing system for the treatment of IDD comprises one or more sgRNAs targeting exon 3 of cTNFRSF3. In some embodiments, the CRISPR gene-editing system for the treatment of IDD comprises one or more sgRNAs targeting exon 4 of cTNFRSF3. In some embodiments, the CRISPR gene-editing system for the treatment of IDD comprises one or more sgRNAs targeting exon 5 of cTNFRSF3. In some embodiments, the CRISPR gene-editing system for the treatment of IDD comprises one or more sgRNAs targeting exon 6 of cTNFRSF3. In some embodiments, the CRISPR gene-editing system for the treatment of IDD comprises one or more sgRNAs targeting exon 7 of cTNFRSF3. In some embodiments, the CRISPR gene-editing system for the treatment of IDD comprises one or more sgRNAs targeting exon 8 of cTNFRSF3. In some embodiments, the CRISPR gene-editing system for the treatment of IDD comprises one or more sgRNAs targeting exon 9 of cTNFRSF3. In some embodiments, the CRISPR gene-editing system for the treatment of IDD comprises one or more sgRNAs targeting exon 10 of cTNFRSF3. In some embodiments, the CRISPR gene-editing system for the treatment of IDD comprising one or more sgRNAs targeting an exon of cTNFRSF3 is delivered via one or more lipid nanoparticles (LNPs), the LNPs comprising an LNP system described herein, e.g., and without limitation, any one of LNP systems LNP001 to LNP240.

[0600] In some embodiments, the CRISPR gene-editing system for the treatment of IDD comprises one or more sgRNAs targeting exon 1 of eTNFRSF3. In some embodiments, the CRISPR gene-editing system for the treatment of IDD comprises one or more sgRNAs targeting exon 2 of eTNFRSF3. In some embodiments, the CRISPR gene-editing system for the treatment of IDD comprises one or more sgRNAs targeting exon 3 of eTNFRSF3. In some embodiments, the CRISPR gene-editing system for the treatment of IDD comprises one or more sgRNAs targeting exon 4 of eTNFRSF3. In some embodiments, the CRISPR gene-editing system for the treatment of IDD comprises one or more sgRNAs targeting exon 5 of eTNFRSF3. In some embodiments, the CRISPR gene-editing system for the treatment of IDD comprises one or more sgRNAs targeting exon 6 of eTNFRSF3. In some embodiments, the CRISPR gene-editing system for the treatment of IDD comprises one or more sgRNAs targeting exon 7 of eTNFRSF3. In some embodiments, the CRISPR gene-editing system for the treatment of IDD comprises one or more sgRNAs targeting exon 8 of eTNFRSF3. In some embodiments, the CRISPR gene-editing system for the treatment of IDD comprises one or more sgRNAs targeting exon 9 of eTNFRSF3. In some embodiments, the CRISPR gene-editing system for the treatment of IDD comprises one or more sgRNAs targeting exon 10 of eTNFRSF3. In some embodiments, the CRISPR gene-editing system for the treatment of IDD comprising one or more sgRNAs targeting an exon of eTNFRSF3 is delivered via one or more lipid nanoparticles (LNPs), the LNPs comprising an LNP system described herein, e.g., and without limitation, any one of LNP systems LNP001 to LNP240.

[0601] In some embodiments, the CRISPR gene-editing system for the treatment of IDD comprises one or more sgRNAs targeting exon 1 of fTNFRSF3. In some embodiments, the CRISPR gene-editing system for the treatment of IDD comprises one or more sgRNAs targeting exon 2 of fTNFRSF3. In some embodiments, the CRISPR gene-editing system for the treatment of IDD comprises one or more sgRNAs targeting exon 3 of fTNFRSF3. In some embodiments, the CRISPR gene-editing system for the treatment of IDD comprises one or more sgRNAs targeting exon 4 of fTNFRSF3. In some embodiments, the CRISPR gene-editing system for the treatment of IDD comprises one or more sgRNAs targeting exon 5 of fTNFRSF3. In some embodiments, the CRISPR gene-editing system for the treatment of IDD comprises one or more sgRNAs targeting exon 6 of fTNFRSF3. In some embodiments, the CRISPR gene-editing system for the treatment of IDD comprises one or more sgRNAs targeting exon 7 of fTNFRSF3. In some embodiments, the CRISPR gene-editing system for the treatment of IDD comprises one or more sgRNAs targeting exon 8 of fTNFRSF3. In some embodiments, the CRISPR gene-editing system for the treatment of IDD comprises one or more sgRNAs targeting exon 9 of fTNFRSF3. In some embodiments, the CRISPR gene-editing system for the treatment of IDD comprises one or more sgRNAs targeting exon 10 of fTNFRSF3. In some embodiments, the CRISPR gene-editing system for the treatment of IDD comprising one or more sgRNAs targeting an exon of fTNFRSF3 is delivered via one or more lipid nanoparticles (LNPs), the LNPs comprising an LNP system described herein, e.g., and without limitation, any one of LNP systems LNP001 to LNP240.

[0602] In some embodiments, the CRISPR gene-editing system for the treatment of IDD comprises one or more sgRNAs targeting TNFRSF4. In some embodiments, the CRISPR gene-editing system for the treatment of IDD comprises one or more sgRNAs targeting hTNFRSF4. In some embodiments, the CRISPR gene-editing system for the treatment of IDD comprises one or more sgRNAs targeting cTNFRSF4. In some embodiments, the CRISPR gene-editing system for the treatment of IDD comprises one or more sgRNAs targeting eTNFRSF4. In some embodiments, the CRISPR gene-editing system for the treatment of IDD comprises one or more sgRNAs targeting fTNFRSF4. In some embodiments, the CRISPR gene-editing system for the treatment of IDD comprising one or more sgRNAs targeting an exon of TNFRSF4 is delivered via one or more lipid nanoparticles (LNPs), the LNPs comprising an LNP system described herein, e.g., and without limitation, any one of LNP systems LNP001 to LNP240.

[0603] In some embodiments, the CRISPR gene-editing system for the treatment of IDD comprises one or more sgRNAs targeting exon 1 of hTNFRSF4. In some embodiments, the CRISPR gene-editing system for the treatment of IDD comprises one or more sgRNAs targeting exon 2 of hTNFRSF4. In some embodiments, the CRISPR gene-editing system for the treatment of IDD comprises one or more sgRNAs targeting exon 3 of hTNFRSF4. In some embodiments, the CRISPR gene-editing system for the treatment of IDD comprises one or more sgRNAs targeting exon 4 of hTNFRSF4. In some embodiments, the CRISPR gene-editing system for the treatment of IDD comprises one or more sgRNAs targeting exon 5 of hTNFRSF4. In some embodiments, the CRISPR gene-editing system for the treatment of IDD comprises one or more sgRNAs targeting exon 6 of hTNFRSF4. In some embodiments, the CRISPR gene-editing system for the treatment of IDD comprising one or more sgRNAs targeting an exon of hTNFRSF4 is delivered via one or more lipid nanoparticles (LNPs), the LNPs comprising an LNP system described herein, e.g., and without limitation, any one of LNP systems LNP001 to LNP240.

[0604] In some embodiments, the CRISPR gene-editing system for the treatment of IDD comprises one or more sgRNAs targeting exon 1 of cTNFRSF4. In some embodiments, the CRISPR gene-editing system for the treatment of IDD comprises one or more sgRNAs targeting exon 2 of cTNFRSF4. In some embodiments, the CRISPR gene-editing system for the treatment of IDD comprises one or more sgRNAs targeting exon 3 of cTNFRSF4. In some embodiments, the CRISPR gene-editing system for the treatment of IDD comprises one or more sgRNAs targeting exon 4 of cTNFRSF4. In some embodiments, the CRISPR gene-editing system for the treatment of IDD comprises one or more sgRNAs targeting exon 5 of cTNFRSF4. In some embodiments, the CRISPR gene-editing system for the treatment of IDD comprises one or more sgRNAs targeting exon 6 of cTNFRSF4. In some embodiments, the CRISPR gene-editing system for the treatment of IDD comprises one or more sgRNAs targeting exon 7 of cTNFRSF4. In some embodiments, the CRISPR gene-editing system for the treatment of IDD comprising one or more sgRNAs targeting an exon of cTNFRSF4 is delivered via one or more lipid nanoparticles (LNPs), the LNPs comprising an LNP system described herein, e.g., and without limitation, any one of LNP systems LNP001 to LNP240.

[0605] In some embodiments, the CRISPR gene-editing system for the treatment of IDD comprises one or more sgRNAs targeting exon 1 of eTNFRSF4. In some embodiments, the CRISPR gene-editing system for the treatment of IDD comprises one or more sgRNAs targeting exon 2 of eTNFRSF4. In some embodiments, the CRISPR gene-editing system for the treatment of IDD comprises one or more sgRNAs targeting exon 3 of eTNFRSF4. In some embodiments, the CRISPR gene-editing system for the treatment of IDD comprises one or more sgRNAs targeting exon 4 of eTNFRSF4. In some embodiments, the CRISPR gene-editing system for the treatment of IDD comprises one or more sgRNAs targeting exon 5 of eTNFRSF4. In some embodiments, the CRISPR gene-editing system for the treatment of IDD comprises one or more sgRNAs targeting exon 6 of eTNFRSF4. In some embodiments, the CRISPR gene-editing system for the treatment of IDD comprises one or more sgRNAs targeting exon 7 of eTNFRSF4. In some embodiments, the CRISPR gene-editing system for the treatment of IDD comprising one or more sgRNAs targeting an exon of eTNFRSF4 is delivered via one or more lipid nanoparticles (LNPs), the LNPs comprising an LNP system described herein, e.g., and without limitation, any one of LNP systems LNP001 to LNP240.

[0606] In some embodiments, the CRISPR gene-editing system for the treatment of IDD comprises one or more sgRNAs targeting exon 1 of fTNFRSF4. In some embodiments, the CRISPR gene-editing system for the treatment of IDD comprises one or more sgRNAs targeting exon 2 of fTNFRSF4. In some embodiments, the CRISPR gene-editing system for the treatment of IDD comprises one or more sgRNAs targeting exon 3 of fTNFRSF4. In some embodiments, the CRISPR gene-editing system for the treatment of IDD comprises one or more sgRNAs targeting exon 4 of fTNFRSF4. In some embodiments, the CRISPR gene-editing system for the treatment of IDD comprises one or more sgRNAs targeting exon 5 of fTNFRSF4. In some embodiments, the CRISPR gene-editing system for the treatment of IDD comprises one or more sgRNAs targeting exon 6 of fTNFRSF4. In some embodiments, the CRISPR gene-editing system for the treatment of IDD comprises one or more sgRNAs targeting exon 7 of fTNFRSF4. In some embodiments, the CRISPR gene-editing system for the treatment of IDD comprising one or more sgRNAs targeting an exon of fTNFRSF4 is delivered via one or more lipid nanoparticles (LNPs), the LNPs comprising an LNP system described herein, e.g., and without limitation, any one of LNP systems LNP001 to LNP240.

[0607] In some embodiments, the CRISPR gene-editing system for the treatment of IDD comprises one or more sgRNAs targeting TNFRSF11A. In some embodiments, the CRISPR gene-editing system for the treatment of IDD comprises one or more sgRNAs targeting hTNFRSF11A. In some embodiments, the CRISPR gene-editing system for the treatment of IDD comprises one or more sgRNAs targeting cTNFRSF11A. In some embodiments, the CRISPR gene-editing system for the treatment of IDD comprises one or more sgRNAs targeting eTNFRSF11A. In some embodiments, the CRISPR gene-editing system for the treatment of IDD comprises one or more sgRNAs targeting fTNFRSF11A. In some embodiments, the CRISPR gene-editing system for the treatment of IDD comprising one or more sgRNAs targeting an exon of TNFRSF11A is delivered via one or more lipid nanoparticles (LNPs), the LNPs comprising an LNP system described herein, e.g., and without limitation, any one of LNP systems LNP001 to LNP240.

[0608] In some embodiments, the CRISPR gene-editing system for the treatment of IDD comprises one or more sgRNAs targeting exon 1 of hTNFRSF11A. In some embodiments, the CRISPR gene-editing system for the treatment of IDD comprises one or more sgRNAs targeting exon 2 of hTNFRSF11A. In some embodiments, the CRISPR gene-editing system for the treatment of IDD comprises one or more sgRNAs targeting exon 3 of hTNFRSF11A. In some embodiments, the CRISPR gene-editing system for the treatment of IDD comprises one or more sgRNAs targeting exon 4 of hTNFRSF11A. In some embodiments, the CRISPR gene-editing system for the treatment of IDD comprises one or more sgRNAs targeting exon 5 of hTNFRSF11A. In some embodiments, the CRISPR gene-editing system for the treatment of IDD comprises one or more sgRNAs targeting exon 6 of hTNFRSF11A. In some embodiments, the CRISPR gene-editing system for the treatment of IDD comprises one or more sgRNAs targeting exon 7 of hTNFRSF11A. In some embodiments, the CRISPR gene-editing system for the treatment of IDD comprises one or more sgRNAs targeting exon 8 of hTNFRSF11A. In some embodiments, the CRISPR gene-editing system for the treatment of IDD comprises one or more sgRNAs targeting exon 9 of hTNFRSF11A. In some embodiments, the CRISPR gene-editing system for the treatment of IDD comprises one or more sgRNAs targeting exon 10 of hTNFRSF11A. In some embodiments, the CRISPR gene-editing system for the treatment of IDD comprises one or more sgRNAs targeting exon 11 of hTNFRSF11A. In some embodiments, the CRISPR gene-editing system for the treatment of IDD comprises one or more sgRNAs targeting exon 12 of hTNFRSF11A. In some embodiments, the CRISPR gene-editing system for the treatment of IDD comprising one or more sgRNAs targeting an exon of hTNFRSF11A is delivered via one or more lipid nanoparticles (LNPs), the LNPs comprising an LNP system described herein, e.g., and without limitation, any one of LNP systems LNP001 to LNP240.

[0609] In some embodiments, the CRISPR gene-editing system for the treatment of IDD comprises one or more sgRNAs targeting exon 1 of cTNFRSF11A. In some embodiments, the CRISPR gene-editing system for the treatment of IDD comprises one or more sgRNAs targeting exon 2 of cTNFRSF11A. In some embodiments, the CRISPR gene-editing system for the treatment of IDD comprises one or more sgRNAs targeting exon 3 of cTNFRSF11A. In some embodiments, the CRISPR gene-editing system for the treatment of IDD comprises one or more sgRNAs targeting exon 4 of cTNFRSF11A. In some embodiments, the CRISPR gene-editing system for the treatment of IDD comprises one or more sgRNAs targeting exon 5 of cTNFRSF11A. In some embodiments, the CRISPR gene-editing system for the treatment of IDD comprises one or more sgRNAs targeting exon 6 of cTNFRSF11A. In some embodiments, the CRISPR gene-editing system for the treatment of IDD comprises one or more sgRNAs targeting exon 7 of cTNFRSF11A. In some embodiments, the CRISPR gene-editing system for the treatment of IDD comprises one or more sgRNAs targeting exon 8 of cTNFRSF11A. In some embodiments, the CRISPR gene-editing system for the treatment of IDD comprises one or more sgRNAs targeting exon 9 of cTNFRSF11A. In some embodiments, the CRISPR gene-editing system for the treatment of IDD comprises one or more sgRNAs targeting exon 10 of cTNFRSF11A. In some embodiments, the CRISPR gene-editing system for the treatment of IDD comprises one or more sgRNAs targeting exon 11 of cTNFRSF11A. In some embodiments, the CRISPR gene-editing system for the treatment of IDD comprising one or more sgRNAs targeting an exon of cTNFRSF11A is delivered via one or more lipid nanoparticles (LNPs), the LNPs comprising an LNP system described herein, e.g., and without limitation, any one of LNP systems LNP001 to LNP240.

[0610] In some embodiments, the CRISPR gene-editing system for the treatment of IDD comprises one or more sgRNAs targeting exon 1 of eTNFRSF11A. In some embodiments, the CRISPR gene-editing system for the treatment of IDD comprises one or more sgRNAs targeting exon 2 of eTNFRSF11A. In some embodiments, the CRISPR gene-editing system for the treatment of IDD comprises one or more sgRNAs targeting exon 3 of eTNFRSF11A. In some embodiments, the CRISPR gene-editing system for the treatment of IDD comprises one or more sgRNAs targeting exon 4 of eTNFRSF11A. In some embodiments, the CRISPR gene-editing system for the treatment of IDD comprises one or more sgRNAs targeting exon 5 of eTNFRSF11A. In some embodiments, the CRISPR gene-editing system for the treatment of IDD comprises one or more sgRNAs targeting exon 6 of eTNFRSF11A. In some embodiments, the CRISPR gene-editing system for the treatment of IDD comprises one or more sgRNAs targeting exon 7 of eTNFRSF11A. In some embodiments, the CRISPR gene-editing system for the treatment of IDD comprises one or more sgRNAs targeting exon 8 of eTNFRSF11A. In some embodiments, the CRISPR gene-editing system for the treatment of IDD comprises one or more sgRNAs targeting exon 9 of eTNFRSF11A. In some embodiments, the CRISPR gene-editing system for the treatment of IDD comprises one or more sgRNAs targeting exon 10 of eTNFRSF11A. In some embodiments, the CRISPR gene-editing system for the treatment of IDD comprising one or more sgRNAs targeting an exon of eTNFRSF11A is delivered via one or more lipid nanoparticles (LNPs), the LNPs comprising an LNP system described herein, e.g., and without limitation, any one of LNP systems LNP001 to LNP240.

[0611] In some embodiments, the CRISPR gene-editing system for the treatment of IDD comprises one or more sgRNAs targeting exon 1 of fTNFRSF11A. In some embodiments, the CRISPR gene-editing system for the treatment of IDD comprises one or more sgRNAs targeting exon 2 of fTNFRSF11A. In some embodiments, the CRISPR gene-editing system for the treatment of IDD comprises one or more sgRNAs targeting exon 3 of fTNFRSF11A. In some embodiments, the CRISPR gene-editing system for the treatment of IDD comprises one or more sgRNAs targeting exon 4 of fTNFRSF11A. In some embodiments, the CRISPR gene-editing system for the treatment of IDD comprises one or more sgRNAs targeting exon 5 of fTNFRSF11A. In some embodiments, the CRISPR gene-editing system for the treatment of IDD comprises one or more sgRNAs targeting exon 6 of fTNFRSF11A. In some embodiments, the CRISPR gene-editing system for the treatment of IDD comprises one or more sgRNAs targeting exon 7 of fTNFRSF11A. In some embodiments, the CRISPR gene-editing system for the treatment of IDD comprises one or more sgRNAs targeting exon 8 of fTNFRSF11A. In some embodiments, the CRISPR gene-editing system for the treatment of IDD comprises one or more sgRNAs targeting exon 9 of fTNFRSF11A. In some embodiments, the CRISPR gene-editing system for the treatment of IDD comprises one or more sgRNAs targeting exon 10 of fTNFRSF11A. In some embodiments, the CRISPR gene-editing system for the treatment of IDD comprises one or more sgRNAs targeting exon 11 of fTNFRSF11A. In some embodiments, the CRISPR gene-editing system for the treatment of IDD comprising one or more sgRNAs targeting an exon of fTNFRSF11A is delivered via one or more lipid nanoparticles (LNPs), the LNPs comprising an LNP system described herein, e.g., and without limitation, any one of LNP systems LNP001 to LNP240.

### VI. Delivery

### A. Lipid Nanoparticles (LNP)

[0612] In some embodiments, a CRISPR gene-editing system is delivered by a nanoparticle. Without wishing to be bound by any particular theory, in certain embodiments, nucleic acids, when present in the nanoparticle, are resistant in aqueous solution to degradation with a nuclease. In other embodiments, proteins are protected from protease degradation. In some embodiments, proteins and nucleic acids encapsulated by nanoparticles are capable of penetrating the cellular plasma membrane.

[0613] Lipid nanoparticles comprising nucleic acids and their method of preparation is disclosed in at least WO2017/019935, WO2017/049074, WO2017/201346, WO2017/218704, WO2018/006052, WO2018/013525, WO2018/089540, WO2018/119115, WO2018/126084, WO2018/157009, WO2018/170336, WO2018/222890, WO2019/046809, WO2019/089828, WO2020/061284, WO2020/061317. WO2020/081938, WO2020/097511, WO2020/097520, WO2020/097540, WO2020/097548, WO2020/214946, WO2020/219941, WO2020/232276, WO2020/227615, WO2020/061295, WO2021/007278, WO2021/016430, WO2021/021988, EP Patent No. EP 2 972 360, US20200155691, US20200237671, U.S. Pat. Nos. 8,058,069, 8,492,359, 8,822,668, 9,364,435, 9,404,127, 9,504,651, 9,593,077, 9,738,593, 9,868,691, 9,868,692, 9,950,068, 10,138,213, 10,166,298, 10,221,127, 10,238,754, 10,266,485, 10,383,952, 10,730,924, 10,766,852, 11,079,379, 11,141,378 and 11,246,933, which are incorporated herein by reference in their entirety for all purposes.

### Lipid Nanoparticle Compositions

[0614] In some embodiments, the largest dimension of a nanoparticle composition is 1 micrometer or shorter (e.g., 1 micrometer, 900 nm, 800 nm, 700 nm, 600 nm, 500 nm, 400 nm, 300 nm, 200 nm, 175 nm, 150 nm, 125 nm, 100 nm, 75 nm, 50 nm, or shorter), e.g., when measured by dynamic light scattering (DLS), transmission electron microscopy, scanning electron microscopy, or another method. Nanoparticle compositions include, for example, lipid nanoparticles (LNPs), liposomes, lipid vesicles, and lipoplexes. In some embodiments, nanoparticle compositions are vesicles including one or more lipid bilayers. In certain embodiments, a nanoparticle composition includes two or more concentric bilayers separated by aqueous compartments. Lipid bilayers may be functionalized and/or crosslinked to one another. Lipid bilayers may include one or more ligands, proteins, or channels. In various embodiments, lipid nanoparticles described herein have a mean diameter of from about 30 nm to about 150 nm, from about 40 nm to about 150 nm, from about 50 nm to about 150 nm, from about 60 nm to about 130 nm, from about 70 nm to about 110 nm, from about 70 nm to about 100 nm, from about 80 nm to about 100 nm, from about 90 nm to about 100 nm, from about 70 nm to about 90 nm, from about 80 nm to about 90 nm, from about 70 nm to about 80 nm, or about 30 nm, 35 nm, 40 nm, 45 nm, 50 nm, 55 nm, 60 nm, 65 nm, 70 nm, 75 nm, 80 nm, 85 nm, 90 nm, 95 nm, 100 nm, 105 nm, 110 nm, 115 nm, 120 nm, 125 nm, 130 nm, 135 nm, 140 nm, 145 nm, or 150 nm, and are substantially non-toxic.

[0615] In certain embodiments, the lipid nanoparticles described herein comprise one or more components, including a lipid component, and (optionally) a structural component. The lipid component comprises lipids selected from ionizable and/or cationic lipids (i.e., lipids that may have a positive or partial positive charge at physiological pH), neutral lipids (e.g., phospholipids, or sphingolipids), and polymer-conjugated lipids (e.g., PEGylated lipids). In some embodiments, the lipid component comprises a single ionizable lipid. In other embodiments, the lipid component comprises 2, 3, 4, 5, 6, 7, 8, 9, 10, 15, or 20 ionizable lipids. In some embodiments, the lipid component comprises a single neutral lipid. In other embodiments, the lipid component comprises 2, 3, 4, 5, 6, 7, 8, 9, 10, 15, or 20 neutral lipids. In some embodiments, the lipid component comprises a single polymer-conjugated lipid. In other embodiments, the lipid component comprises 2, 3, 4, 5, 6, 7, 8, 9, 10, 15, or 20 polymer-conjugated lipids. In some embodiments, the structural component comprises a single structural lipid. In other embodiments, the structural component comprises 2, 3, 4, 5, 6, 7, 8, 9, 10, 15, or 20 structural lipids. In some embodiments, the lipid component comprises at least one cationic lipid, at least one neutral lipid, and at least one polymer-conjugated lipid. The present disclosure contemplates that the lipid component may comprise any combination of the foregoing constituents.

### Ionizable/Cationic Lipids

[0616] In some embodiments, the lipid component comprises an ionizable lipid. In some embodiments, the ionizable lipid is anionic. In other embodiments, the ionizable lipid is a cationic lipid. In some embodiments, the lipid component comprises cationic lipids including, but not limited to, a cationic lipid selected from the group consisting of 3-(didodecylamino)-N1,N1,4-tridodecyl-1-piperazineethanamine (KL10), N1-[2-(didodecylamino)ethyl]-N1,N4,N4-tridodecyl-1,4-piperazinediethanamine (KL22), 14,25-ditridecyl-15,18,21,24-tetraaza-octatriacontane (KL25), 1,2-dilinoleyloxy-N,N-dimethylaminopropane (DLin-DMA), 2,2-dilinoleyl-4-dimethylaminomethyl-[1,3]-dioxolane (DLin-K-DMA), heptatriaconta-6,9,28,31-tetraen-19-yl 4-(dimethylamino)butanoate (DLin-MC3-DMA), 2,2-dilinoleyl-4-(2-dimethylaminoethyl)-[1,3]-dioxolane (DLin-KC2-DMA), 1,2-dioleyloxy-N,N-dimethylaminopropane (DODMA), 2-({8-[(3.beta.)-cholest-5-en-3-yloxy]octyl}oxy)-N,N-dimethyl-3-[(9Z,12Z)-octadeca-9,12-dien-1-yloxy]propan-1-amine (Octyl-CLinDMA), (2R)-2-({8-[(3.beta.)-cholest-5-en-3-yloxy]octyl}oxy)-N,N-dimethyl-3-[(9Z-,12Z)-octadeca-9,12-dien-1-yloxy]propan-1-amine (Octyl-CLinDMA (2R)), (2S)-2-({8-[(3.beta.)-cholest-5-en-3-yloxy]octyl}oxy)-N,N-dimethyl-3-[(9Z-,12Z)-octadeca-9,12-dien-1-yloxy]propan-1-amine (Octyl-CLinDMA (2S)), a lipid including a cyclic amine group, and mixtures thereof.

[0617] Non-exhaustive and non-limiting examples of cationic lipids include:

[chemical structure]

[chemical structure]

[chemical structure]

[chemical structure]

[chemical structure]

[chemical structure]

### Neutral Lipids/Phospholipids

[0618] In some embodiments, the lipid component further comprises neutral lipids including, but not limited to, a phospholipid selected from the group consisting of 1,2-dilinoleoyl-sn-glycero-3-phosphocholine (DLPC), 1,2-dimyristoyl-sn-glycero-phosphocholine (DMPC), 1,2-dioleoyl-sn-glycero-3-phosphocholine (DOPC), 1,2-dipalmitoyl-sn-glycero-3-phosphocholine (DPPC), 1,2-distearoyl-sn-glycero-3-phosphocholine (DSPC), 1,2-diundecanoyl-sn-glycero-phosphocholine (DUPC), 1-palmitoyl-2-oleoyl-sn-glycero-3-phosphocholine (POPC), 1,2-di-O-octadecenyl-sn-glycero-3-phosphocholine (18:0 Diether PC), 1-oleoyl-2-cholesterylhemisuccinoyl-sn-glycero-3-phosphocholine (OChemsPC), 1-hexadecyl-sn-glycero-3-phosphocholine (C16 Lyso PC), 1,2-dilinolenoyl-sn-glycero-3-phosphocholine, 1,2-diarachidonoyl-sn-glycero-3-phosphocholine, 1,2-didocosahexaenoyl-sn-glycero-3-phosphocholine, 1,2-dioleoyl-sn-glycero-3-phosphoethanolamine (DOPE), 1,2-diphytanoyl-sn-glycero-3-phosphoethanolamine (ME 16.0 PE), 1,2-distearoyl-sn-glycero-3-phosphoethanolamine, 1,2-dilinoleoyl-sn-glycero-3-phosphoethanolamine, 1,2-dilinolenoyl-sn-glycero-3-phosphoethanolamine, 1,2-diarachidonoyl-sn-glycero-3-phosphoethanolamine, 1,2-didocosahexaenoyl-sn-glycero-3-phosphoethanolamine, 1,2-dioleoyl-sn-glycero-3-phospho-rac-(1-glycerol) sodium salt (DOPG), sphingomyelin (SM), and mixtures thereof.

### Polymer-Conjugated Lipids

[0619] In some embodiments, the lipid component further comprises polymer-conjugated lipids, including, but not limited to, a PEGylated lipid selected from the group consisting of PEG-modified phosphatidylethanolamines, PEG-modified phosphatidic acids, PEG-modified ceramides, PEG-modified dialkylamines, PEG-modified diacylglycerols, PEG-modified dialkylglycerols, and mixtures thereof. For example, a PEG lipid may be PEG-c-DOMG, PEG-DMG, PEG₂₀₀₀-c-DMG, PEG-DLPE, PEG-DMPE, PEG-DPPC, PEG-DMA or a PEG-DSPE lipid.

[0620] Non-exhaustive and non-limiting examples of PEG lipids include:

[chemical structure]

[chemical structure]

[chemical structure]

### Structural Lipids/Sterols

[0621] In some embodiments, the LNP further comprises a structural component. See generally Patel, S., et al. (2020). Nature Communications, 11(1), 1-13. In some embodiments, the structural component comprises a sterol including, but not limited to, a sterol selected from the group consisting of cholesterol, fecosterol, stigmasterol, stigmastanol, sitosterol, β-sitosterol, lupeol, betulin, ursolic acid, oleanolic acid, campesterol, fucosterol, brassicasterol, ergosterol, 9,11-dehydroergosterol, tomatidine, tomatine, α-tocopherol, and mixtures thereof. In other embodiments, the structural lipid includes cholesterol and a corticosteroid (e.g., prednisolone, dexamethasone, prednisone, and hydrocortisone), or a combination thereof.

[0622] Non-exhaustive and non-limiting examples of structural lipids include:

[chemical structure]

### Formulations

[0623] Nanoparticle compositions may include a lipid component and one or more additional components, such as a therapeutic and/or prophylactic. A nanoparticle composition may be designed for one or more specific applications or targets. The elements of a nanoparticle composition may be selected based on a particular application or target, and/or based on the efficacy, toxicity, expense, ease of use, availability, or other feature of one or more elements. Similarly, the particular formulation of a nanoparticle composition may be selected for a particular application or target according to, for example, the efficacy and toxicity of particular combinations of elements.

[0624] The lipid component of a nanoparticle composition may include, for example, a cationic lipid, a phospholipid (such as an unsaturated lipid, e.g., DOPE or DSPC), a PEG lipid, and a structural lipid. The elements of the lipid component may be provided in specific fractions.

[0625] In some embodiments, the lipid component of a nanoparticle composition includes an ionizable lipid, a phospholipid, a PEG lipid, and a structural lipid. In certain embodiments, the lipid component of the nanoparticle composition includes about 30 mol % to about 60 mol % ionizable lipid, about 0 mol % to about 30 mol % phospholipid, about 0 mol % to about 10 mol % of PEG lipid, and about 17.5 mol % to about 50 mol % structural lipid, provided that the total mol % does not exceed 100%. In some embodiments, the lipid component of the nanoparticle composition includes about 35 mol % to about 55 mol % compound of ionizable lipid, about 5 mol % to about 25 mol % phospholipid, about 0 mol % to about 10 mol % of PEG lipid, and about 30 mol % to about 40 mol % structural lipid. In a particular embodiment, the lipid component includes about 50 mol % said compound, about 10 mol % phospholipid, about 38.5 mol % structural lipid, and about 1.5 mol % of PEG lipid. In another embodiment, the lipid component includes about 40 mol % said compound, about 20 mol % phospholipid, about 38.5 mol % structural lipid, and about 1.5 mol % of PEG lipid. In some embodiments, the phospholipid may be DOPE or DSPC. In other embodiments, the PEG lipid may be PEG-DMG and/or the structural lipid may be cholesterol.

[0626] In some embodiments, the ionizable lipids comprise between about 20 and about 60 mol % of the lipid component. In other embodiments, the ionizable lipids comprise between about 35 and about 55 mol % of the lipid component. In various embodiments, the ionizable lipids comprise about 20, 21, 22, 23, 24, 25, 26, 27, 28, 29, 30, 35, 40, 45, 50, 55, or 60 mol % of the lipid component.

[0627] In some embodiments, the neutral lipids comprise between about 0 and about 30 mol % of the lipid component. In other embodiments, the neutral lipids comprise between about 5 and about 25 mol % of the lipid component. In various embodiments, the neutral lipids comprise about 1, 2, 3, 4, 5, 6, 7, 8, 9, 10, 11, 12, 13, 14, 15, 16, 17, 18, 19, 20, 25, or 30 mol % of the lipid component.

[0628] In some embodiments, the polymer-conjugated lipids comprise between about 0 and about 15 mol % of the lipid component. In other embodiments, the polymer-conjugated lipids comprise between about 0.5 and about 10 mol % of the lipid component. In various embodiments, the polymer-conjugated lipids comprise about 0.5, 1, 1.5, 2, 2.5, 3, 3.5, 4, 4.5, 5, 5.5, 6, 6.5, 7, 7.5, 8, 8.5 9, 9.5, 10, or 15 mol % of the lipid component.

[0629] In some embodiments, the structural component comprises about 17.5 mol % to about 50 mol % of the lipid component. In other embodiments, the structural component comprises about 30 to about 40 mol % of the lipid component. In various embodiments, the structural component comprises about 17.5, 20, 22.5, 25, 27.5, 30, 31, 32, 33, 34, 35, 36, 37, 38, 39, 40, 41, 42, 43, 44, 45, 46, 47, 48, 49, or 50 mol % of the lipid component.

[0630] The structural component may alternatively be expressed as a ratio relative to the lipid component. In some embodiments, the structural component is in a ratio of about 1:1 with the lipid component (sterol:lipids). In other embodiments, the structural component is in a ratio of about 1:5 with the lipid component (sterol:lipids). In various embodiments, the structural component is in a ratio of about 1:1, 1:2, 1:3, 1:4,1:5, 1:6, 1:7, 1:8, 1:9, 1:10, 1:15, 1:20, or 1:25 with the lipid component (sterol:lipids).

[0631] Nanoparticle compositions may be designed for one or more specific applications or targets. For example, a nanoparticle composition may be designed to deliver a therapeutic and/or prophylactic such as an RNA to a particular cell, tissue, organ, or system or group thereof in a mammal's body. Physiochemical properties of nanoparticle compositions may be altered in order to increase selectivity for particular bodily targets. For instance, particle sizes may be adjusted based on the fenestration sizes of different organs. The therapeutic and/or prophylactic included in a nanoparticle composition may also be selected based on the desired delivery target or tar-gets. For example, a therapeutic and/or prophylactic may be selected for a particular indication, condition, disease, or disorder and/or for delivery to a particular cell, tissue, organ, or system or group thereof (e.g., localized or specific delivery). In certain embodiments, a nanoparticle com-position may include an mRNA encoding a polypeptide of interest capable of being translated within a cell to produce the polypeptide of interest. Such a composition may be designed to be specifically delivered to a particular organ. In some embodiments, a composition may be de-signed to be specifically delivered to a mammalian joint.

[0632] The amount of a therapeutic and/or prophylactic in a nanoparticle composition may depend on the size, composition, desired target and/or application, or other properties of the nanoparticle composition as well as on the properties of the therapeutic and/or prophylactic. For example, the amount of an RNA useful in a nanoparticle composition may depend on the size, sequence, and other characteristics of the RNA. The relative amounts of a therapeutic and/or prophylactic and other elements (e.g., lipids) in a nanoparticle composition may also vary. In some embodiments, the wt/wt ratio of the lipid component to a therapeutic and/or prophylactic in a nanoparticle composition may be from about 5:1 to about 60:1, such as 5:1, 6:1, 7:1, 8:1, 9:1, 10:1, 11:1, 12:1, 13:1, 14:1, 15:1, 16:1, 17:1, 18:1, 19:1, 20:1, 25:1, 30:1, 35:1, 40:1, 45:1, 50:1, and 60:1. For example, the wt/wt ratio of the lipid component to a therapeutic and/or prophylactic may be from about 10:1 to about 40:1. In certain embodiments, the wt/wt ratio is about 20:1. The amount of a therapeutic and/or prophylactic in a nanoparticle composition may, for example, be measured using absorption spectroscopy (e.g., ultraviolet-visible spectroscopy).

[0633] In some embodiments, the therapeutic and/or prophylactic comprises a nucleic acid component. In some embodiments, the nucleic acid component comprises RNA including, but not limited to, RNA selected from the group consisting of messenger RNA (mRNA), CRISPR RNA (crRNA), tracrRNA, single-guide RNA (sgRNA), short interfering RNA (siRNA), antisense oligonucleotides (ASO), and mixtures thereof. In other embodiments, the nucleic acid component comprises DNA including, but not limited to, DNA selected from the group consisting of linear DNA, plasmid DNA, antisense oligonucleotide, and mixtures thereof.

[0634] In some embodiments, a nanoparticle composition includes one or more RNAs, and the one or more RNAs, lipids, and amounts thereof may be selected to provide a specific N:P ratio. The N:P ratio of the composition refers to the molar ratio of nitrogen atoms in one or more lipids to the number of phosphate groups in an RNA. In general, a lower N:P ratio is preferred. The one or more RNA, lipids, and amounts thereof may be selected to provide an N:P ratio from about 2:1 to about 30:1, such as 2:1, 3:1, 4:1, 5:1, 6:1, 7:1, 8:1, 9:1, 10:1, 12:1, 14:1, 16:1, 18:1, 20:1, 22:1, 24:1, 26:1, 28:1, or 30:1. In certain embodiments, the N:P ratio may be from about 2:1 to about 8:1. In other embodiments, the N:P ratio is from about 5:1 to about 8:1. For example, the N:P ratio may be about 5.0:1, about 5.5:1, about 5.67:1, about 6.0:1, about 6.5:1, or about 7.0:1. For example, the N:P ratio may be about 5.67:1.

[0635] In some embodiments, the nucleic acid component is comprised of a modified nucleic acid. For example, an RNA may be a modified RNA. That is, an RNA may include one or more nucleobases, nucleosides, nucleotides, or linkers that are non-naturally occurring. A “modified” species may also be referred to herein as an “altered” species. Species may be modified or altered chemically, structurally, or functionally. For example, a modified nucleobase species may include one or more substitutions that are not naturally occurring.

[0636] In certain embodiments, the present disclosure comprises methods for treating back or spine conditions or disorders. In other embodiments, the present disclosure comprises methods for treating discogenic disorders. In some embodiments, the present disclosure comprises methods for treating localized nociception, inflammation, or morphological changes associated with back or spine conditions or disorders in a subject in need thereof, the method comprising administering a therapeutically effective amount of a CRISPR-Cas composition encapsulated within or associated with a lipid nanoparticle (LNP), wherein the composition comprises one or more non-naturally occurring polynucleotides encoding a Cas9 protein and at least one sgRNA. In some embodiments, LNPs are administered intradiscally. In other embodiments, LNPs are administered epidurally. In some embodiments, LNPs are administered peridiscally. In some embodiments, LNPs are administered perivertebrally.

### Physical Properties

[0637] The characteristics of a nanoparticle composition may depend on the components thereof. For example, a nanoparticle composition including cholesterol as a structural lipid may have different characteristics than a nanoparticle composition that includes a different structural lipid. Similarly, the characteristics of a nanoparticle composition may depend on the absolute or relative amounts of its components. For instance, a nanoparticle composition including a higher molar fraction of a phospholipid may have different characteristics than a nanoparticle composition including a lower molar fraction of a phospholipid. Characteristics may also vary depending on the method and conditions of preparation of the nanoparticle composition.

[0638] Nanoparticle compositions may be characterized by a variety of methods. For example, microscopy (e.g., transmission electron microscopy or scanning electron microscopy) may be used to examine the morphology and size distribution of a nanoparticle composition. Dynamic light scattering or potentiometry (e.g., potentiometric titrations) may be used to measure zeta potentials. Dynamic light scattering may also be utilized to determine particle sizes. Instruments such as the Zetasizer Nano ZS (Malvern Instruments Ltd, Malvern, Worcestershire, UK) may also be used to measure multiple characteristics of a nanoparticle composition, such as particle size, polydispersity index, and zeta potential.

[0639] The mean size of a nanoparticle composition may be between 10 nm and 1 micrometer, e.g., measured by dynamic light scattering (DLS). For example, the mean size may be from about 40 nm to about 150 nm, such as about 40 nm, 45 nm, 50 nm, 55 nm, 60 nm, 65 nm, 70 nm, 75 nm, 80 nm, 85 nm, 90 nm, 95 nm, 100 nm, 105 nm, 110 nm, 115 nm, 120 nm, 125 nm, 130 nm, 135 nm, 140 nm, 145 nm, or 150 nm. In some embodiments, the mean size of a nanoparticle composition may be from about 50 nm to about 100 nm, from about 50 nm to about 90 nm, from about 50 nm to about 80 nm, from about 50 nm to about 70 nm, from about 50 nm to about 60 nm, from about 60 nm to about 100 nm, from about 60 nm to about 90 nm, from about 60 nm to about 80 nm, from about 60 nm to about 70 nm, from about 70 nm to about 100 nm, from about 70 nm to about 90 nm, from about 70 nm to about 80 nm, from about 80 nm to about 100 nm, from about 80 nm to about 90 nm, or from about 90 nm to about 100 nm. In certain embodiments, the mean size of a nanoparticle composition may be from about 70 nm to about 100 nm. In a particular embodiment, the mean size may be about 80 nm. In other embodiments, the mean size may be about 100 nm.

[0640] A nanoparticle composition may be relatively homogenous. A polydispersity index may be used to indicate the homogeneity of a nanoparticle composition, e.g., the particle size distribution of the nanoparticle compositions. A small (e.g., less than 0.3) polydispersity index generally indicates a narrow particle size distribution. A nanoparticle composition may have a polydispersity index from about 0 to about 0.25, such as 0.01, 0.02, 0.03, 0.04, 0.05, 0.06, 0.07, 0.08, 0.09, 0.10, 0.11, 0.12, 0.13, 0.14, 0.15, 0.16, 0.17, 0.18, 0.19, 0.20, 0.21, 0.22, 0.23, 0.24, or 0.25. In some embodiments, the polydispersity index of a nanoparticle composition may be from about 0.10 to about 0.20.

[0641] The zeta potential of a nanoparticle composition may be used to indicate the electrokinetic potential of the composition. For example, the zeta potential may describe the surface charge of a nanoparticle composition. Nanoparticle compositions with relatively low charges, positive or negative, are generally desirable, as more highly charged species may interact undesirably with cells, tissues, and other elements in the body. In some embodiments, the zeta potential of a nanoparticle composition may be from about −10 mV to about +20 mV, from about −10 mV to about +15 mV, from about −10 mV to about +10 mV, from about −10 mV to about +5 mV, from about −10 mV to about 0 mV, from about −10 mV to about −5 mV, from about −5 mV to about +20 mV, from about −5 mV to about +15 mV, from about −5 mV to about +10 mV, from about −5 mV to about +5 mV, from about −5 mV to about 0 mV, from about 0 mV to about +20 mV, from about 0 mV to about +15 mV, from about 0 mV to about +10 mV, from about 0 mV to about +5 mV, from about +5 mV to about +20 mV, from about +5 mV to about +15 mV, or from about +5 mV to about +10 mV.

[0642] The efficiency of encapsulation of a therapeutic and/or prophylactic describes the amount of therapeutic and/or prophylactic that is encapsulated or otherwise associated with a nanoparticle composition after preparation, relative to the initial amount provided. The encapsulation efficiency is desirably high (e.g., close to 100%). The encapsulation efficiency may be measured, for example, by comparing the amount of therapeutic and/or prophylactic in a solution containing the nanoparticle composition before and after breaking up the nanoparticle composition with one or more organic solvents or detergents. Fluorescence may be used to measure the amount of free therapeutic and/or prophylactic (e.g., RNA) in a solution. For the nanoparticle compositions described herein, the encapsulation efficiency of a therapeutic and/or prophylactic may be at least 50%, for example 50%, 55%, 60%, 65%, 70%, 75%, 80%, 85%, 90%, 91%, 92%, 93%, 94%, 95%, 96%, 97%, 98%, 99%, or 100%. In some embodiments, the encapsulation efficiency may be at least 80%. In certain embodiments, the encapsulation efficiency may be at least 90%.

[0643] A nanoparticle composition may optionally comprise one or more coatings. For example, a nanoparticle composition may be formulated in a capsule, film, or tablet having a coating. A capsule, film, or tablet including a composition described herein may have any useful size, tensile strength, hardness, or density.

[0644] Unless otherwise defined, all technical and scientific terms used herein have the same meaning as commonly understood by one of ordinary skill in the art to which this disclosure belongs. Although methods and materials similar or equivalent to those described herein may be used in the practice or testing of the present disclosure, suitable methods and materials are described below. All publications, patent applications, patents, and other references mentioned herein are incorporated by reference in their entirety. In addition, the materials, methods, and examples are illustrative only and not intended to be limiting.

[0645] In some embodiments, the CRISPR gene-editing system comprises one or more RNA-containing compositions. In some embodiments, the CRISPR gene-editing system further comprises one or more nanoparticles. In some embodiments, said one or more RNA-containing compositions comprises a guide RNA. In some embodiments, said one or more RNA-containing compositions comprises an mRNA. In some embodiments, said one or more RNA-containing compositions comprises an RNP (e.g., Cas9 and a guide RNA). In some embodiments, said one or more nanoparticles are lipid nanoparticles (LNP).

[0646] In some embodiments, the CRISPR gene-editing system comprises one or more LNPs collectively encapsulating (i) the RNA-guided nuclease or the nucleic acid encoding the RNA-guided nuclease and (ii) the at least one guide RNA or the nucleic acid encoding the at least one guide RNA. In some embodiments, the one or more LNPs comprises a first plurality of LNP encapsulating the RNA-guided nuclease or a nucleic acid encoding an RNA-guided nuclease and a second plurality of LNP encapsulating the at least one guide RNA or a nucleic acid encoding at least one guide RNA.

[0647] In some embodiments, the one or more LNP comprises a component selected from the group consisting of 3-(didodecylamino)-N1,N1,4-tridodecyl-1-piperazineethanamine (KL10), N1-[2-(didodecylamino)ethyl]-N1,N4,N4-tridodecyl-1,4-piperazinediethanamine (KL22), 14,25-ditridecyl-15,18,21,24-tetraaza-octatriacontane (KL25), 1,2-dilinoleyloxy-N,N-dimethylaminopropane (DLin-DMA), 2,2-dilinoleyl-4-dimethylaminomethyl-[1,3]-dioxolane (DLin-K-DMA), heptatriaconta-6,9,28,31-tetraen-19-yl 4-(dimethylamino)butanoate (DLin-MC3-DMA), 2,2-dilinoleyl-4-(2-dimethylaminoethyl)-[1,3]-dioxolane (DLin-KC2-DMA), 1,2-dioleyloxy-N,N-dimethylaminopropane (DODMA), 2-({8-[(3.beta.)-cholest-5-en-3-yloxy]octyl}oxy)-N,N-dimethyl-3-[(9Z,12Z)-octadeca-9,12-dien-1-yloxy]propan-1-amine (Octyl-CLinDMA), (2R)-2-({8-[(3.beta.)-cholest-5-en-3-yloxy]octyl}oxy)-N,N-dimethyl-3-[(9Z-,12Z)-octadeca-9,12-dien-1-yloxy]propan-1-amine (Octyl-CLinDMA (2R)), (2S)-2-({8-[(3.beta.)-cholest-5-en-3-yloxy]octyl}oxy)-N,N-dimethyl-3-[(9Z-,12Z)-octadeca-9,12-dien-1-yloxy]propan-1-amine (Octyl-CLinDMA (2S)), a lipid including a cyclic amine group, and a mixture thereof.

[0648] In some embodiments, the one or more LNP comprises a component selected from the group consisting of 1,2-dilinoleoyl-sn-glycero-3-phosphocholine (DLPC), 1,2-dimyristoyl-sn-glycero-phosphocholine (DMPC), 1,2-dioleoyl-sn-glycero-3-phosphocholine (DOPC), 1,2-dipalmitoyl-sn-glycero-3-phosphocholine (DPPC), 1,2-distearoyl-sn-glycero-3-phosphocholine (DSPC), 1,2-diundecanoyl-sn-glycero-phosphocholine (DUPC), 1-palmitoyl-2-oleoyl-sn-glycero-3-phosphocholine (POPC), 1,2-di-O-octadecenyl-sn-glycero-3-phosphocholine (18:0 Diether PC), 1-oleoyl-2-cholesterylhemisuccinoyl-sn-glycero-3-phosphocholine (OChemsPC), 1-hexadecyl-sn-glycero-3-phosphocholine (C16 Lyso PC), 1,2-dilinolenoyl-sn-glycero-3-phosphocholine, 1,2-diarachidonoyl-sn-glycero-3-phosphocholine, 1,2-didocosahexaenoyl-sn-glycero-3-phosphocholine, 1,2-dioleoyl-sn-glycero-3-phosphoethanolamine (DOPE), 1,2-diphytanoyl-sn-glycero-3-phosphoethanolamine (ME 16.0 PE), 1,2-distearoyl-sn-glycero-3-phosphoethanolamine, 1,2-dilinoleoyl-sn-glycero-3-phosphoethanolamine, 1,2-dilinolenoyl-sn-glycero-3-phosphoethanolamine, 1,2-diarachidonoyl-sn-glycero-3-phosphoethanolamine, 1,2-didocosahexaenoyl-sn-glycero-3-phosphoethanolamine, 1,2-dioleoyl-sn-glycero-3-phospho-rac-(1-glycerol) sodium salt (DOPG), sphingomyelin (SM), and a mixture thereof.

[0649] In some embodiments, the one or more LNP comprises a component selected from the group consisting of PEG-modified phosphatidylethanolamines, PEG-modified phosphatidic acids, PEG-modified ceramides, PEG-modified dialkylamines, PEG-modified diacylglycerols, PEG-modified dialkylglycerols, and mixtures thereof. For example, a PEG lipid may be PEG-c-DOMG, PEG-DMG, PEG-DLPE, PEG-DMPE, PEG-DPPC, PEG-DMA, a PEG-DSPE lipid, and a mixture thereof.

[0650] In some embodiments, the one or more LNP comprises a component selected from the group consisting of a cholesterol, fecosterol, stigmasterol, stigmastanol, sitosterol, β-sitosterol, lupeol, betulin, ursolic acid, oleanolic acid, campesterol, fucosterol, brassicasterol, ergosterol, 9, 11-dehydroergosterol, tomatidine, tomatine, α-tocopherol, and a mixture thereof.

[0651] In some embodiments, use of the CRISPR gene-editing system further comprising one or more LNPs to target a gene selected from IL1R1, IL1RAP, TGFBR1, TGFBR2, IL6R, IL6ST, TNFRSF1A, TNFRSF1B, TNFRSF3, TNFRSF4, TNFRSF11A, and combinations thereof is therapeutic.

[0652] In some aspect, use of the CRISPR gene-editing system further comprising one or more LNPs to target TGFBR1 and/or TGFBR2 is therapeutic. In some embodiments, use of the system treats one or more joint disease or illness or one or more back or spine conditions or disorders. In some embodiments, use of the system treats one or more musculoskeletal diseases, conditions, and illnesses, including, but not limited to. Loeys-Dietz Syndrome, osteoarthritis, Marfan syndrome, aortic aneurysm (e.g., familial thoracic 3 aortic aneurysm), craniofacial abnormalities, and combinations thereof. In other embodiments, use of the system treats neoplastic diseases, conditions, and illnesses, including, but not limited to, pancreatic cancer, multiple self-healing squamous epithelioma (Ferguson-Smith disease), gastrointestinal stromal tumors (GIST), hereditary nonpolyposis colorectal cancer (Lynch Syndrome), metastatic colorectal carcinoma, bone neoplasms, anaplastic carcinoma, spindle-cell carcinoma, lung neoplasms, brain neoplasms, and combinations thereof.

[0653] In some embodiments, the CRISPR gene-editing system further comprising one or more LNPs to target IL1R1 and/or IL1RAP is therapeutic. In some embodiments, use of the system treats one or more joint disease or illness or one or more back or spine conditions or disorders. In some embodiments, use of the system treats one or more musculoskeletal diseases, conditions, and illnesses, including, but not limited to, rheumatoid arthritis, gout, osteoarthritis, osteoporosis, intervertebral disc disease (IVDD), psoriatic arthritis, arthritis, polymyositis, proliferative synovitis, bone neoplasms, sarcoid myopathy, cortex bone disorders, idiopathic scoliosis, tendinopathy, myofibrillar myopathy, enthesis-related arthritis, ankylosing spondylitis, degenerative polyarthritis, arthropathy, osteitis deformans, prolapsed lumbar disc, polymyositis ossificans, idiopathic polymyositis, Luft Disease, adult-onset Still's Disease, osteoarthritis deformans, Bachet's Disease, and combinations thereof. In other embodiments, use of the system treats one or more neoplastic diseases, conditions, and illnesses, including, but not limited to, osteosarcoma, multiple myeloma, lymphoma (e.g., B-cell or cutaneous T-cell lymphoma), leukemia, thyroid carcinoma, glioma, renal cell carcinoma, chondrosarcoma, glioblastoma, melanoma, neuroblastoma, polycystic ovary syndrome, Kaposi sarcoma, squamous cell carcinoma, leiomyosarcoma, malignant peripheral nerve sheath tumor, Ewing's sarcoma, esophageal neoplasms, colon cancer, lung cancer, breast cancer, pancreatic cancer, stomach cancer, epithelial ovarian cancer, cholectoral cancer, liver cancer, skin cancer, prostate cancer, cervical cancer, ovarian cancer, bladder cancer, oral cavity cancer, and combinations thereof. In other embodiments, use of the system treats one or more inflammatory diseases, conditions, and illnesses, including, but not limited to, autoinflammatory disease (AID), cryopyrin-associated periodic syndrome (CAPS), systemic lupus erythematosus (SLE), inflammatory bowel disease (IBD) and combinations thereof. In some embodiments, use of the system treats one or more cardiac diseases, conditions, and illnesses, including, but not limited to, myocardial infarction, heart failure (e.g., refractory or acute decompensated heart failure), arrythmias, pericarditis (e.g., refractory idiopathic pericarditis), myocarditis, sepsis-induced cardiomyopathy, atherosclerosis, coronary artery disease and combinations thereof. In some embodiments, use of the system treats one or more neurological diseases, conditions, and illnesses, including, but not limited to, acute thrombotic stroke, epilepsy, multiple sclerosis, Alzheimer's Disease and combinations thereof. In some embodiments, use of the system treats one or more ophthalmic diseases, conditions, and illnesses, including, but not limited to, uveitis, scleritis, Sjogren asthenia, dry eye and combinations thereof. In some embodiments, use of the system treats one or more diseases, conditions, and illnesses, including, but not limited to, chronic kidney disease, Type 2 diabetes, gastroesophageal reflux disease (GERD), non-HP-associated peptic ulcer disease, and pulmonary fibrosis.

### B. Virus-Like Particles

[0654] In one aspect, the present disclosure encompasses means for delivering a CRISPR gene-editing system to a mammalian cell via a virus-like particle (VLP). In some embodiments, a CRISPR gene-editing system is delivered by a VLP. Without wishing to be bound by any particular theory, in certain embodiments, nucleic acids, when present in the particle, are resistant in aqueous solution to degradation with a nuclease. In other embodiments, proteins are protected from protease degradation while present in the particle. In some embodiments, proteins and nucleic acids encapsulated by VLPs are capable of penetrating the cellular plasma membrane.

[0655] In some embodiments, the CRISPR gene-editing system comprises one or more RNA-containing compositions. In some embodiments, the CRISPR gene-editing system further comprises one or more VLPs. In some embodiments, said one or more RNA-containing compositions comprises a guide RNA. In some embodiments, said one or more RNA-containing compositions comprises an mRNA. In some embodiments, said one or more RNA-containing compositions comprises an RNP (e.g., Cas9 and a guide RNA).

[0656] In some embodiments, the CRISPR gene-editing system comprises one or more virus-like particles collectively encapsulating (i) the RNA-guided nuclease or the nucleic acid encoding the RNA-guided nuclease and (ii) the at least one guide RNA or the nucleic acid encoding the at least one guide RNA. In some embodiments, the one or more virus-like particles comprises a first plurality of virus-like particles encapsulating the RNA-guided nuclease or a nucleic acid encoding an RNA-guided nuclease and a second plurality of virus-like particles encapsulating the at least one guide RNA or a nucleic acid encoding at least one guide RNA.

[0657] In some embodiments, use of the CRISPR gene-editing system further comprising one or more LNPs to target a gene selected from IL1R1, IL1RAP, TGFBR1, TGFBR2, IL6R, IL6ST, TNFRSF1A, TNFRSF1B, TNFRSF3, TNFRSF4, TNFRSF11A, and combinations thereof is therapeutic.

[0658] In one aspect, use of the CRISPR gene-editing system further comprising one or more VLPs to target TGFBR1 and/or TGFBR2 is therapeutic. In some embodiments, use of the system treats one or more joint disease or illness or one or more back or spine conditions or disorders. In some embodiments, use of the system treats one or more musculoskeletal diseases, conditions, and illnesses, including, but not limited to, Loeys-Dietz Syndrome, osteoarthritis, Marfan syndrome, aortic aneurysm (e.g., familial thoracic 3 aortic aneurysm), craniofacial abnormalities, and combinations thereof. In other embodiments, use of the system treats neoplastic diseases, conditions, and illnesses, including, but not limited to, pancreatic cancer, multiple self-healing squamous epithelioma (Ferguson-Smith disease), gastrointestinal stromal tumors (GIST), hereditary nonpolyposis colorectal cancer (Lynch Syndrome), metastatic colorectal carcinoma, bone neoplasms, anaplastic carcinoma, spindle-cell carcinoma, lung neoplasms, brain neoplasms, and combinations thereof.

[0659] In some embodiments, the CRISPR gene-editing system further comprising one or more VLPs to target IL1R1 and/or IL1RAP is therapeutic. In some embodiments, use of the system treats one or more joint disease or illness or one or more back or spine conditions or disorders. In some embodiments, use of the system treats one or more musculoskeletal diseases, conditions, and illnesses, including, but not limited to, rheumatoid arthritis, gout, osteoarthritis, osteoporosis, intervertebral disc disease (IVDD), psoriatic arthritis, arthritis, polymyositis, proliferative synovitis, bone neoplasms, sarcoid myopathy, cortex bone disorders, idiopathic scoliosis, tendinopathy, myofibrillar myopathy, enthesis-related arthritis, ankylosing spondylitis, degenerative polyarthritis, arthropathy, osteitis deformans, prolapsed lumbar disc, polymyositis ossificans, idiopathic polymyositis, Luft Disease, adult-onset Still's Disease, osteoarthritis deformans, Bachet's Disease, and combinations thereof. In other embodiments, use of the system treats one or more neoplastic diseases, conditions, and illnesses, including, but not limited to, osteosarcoma, multiple myeloma, lymphoma (e.g., B-cell or cutaneous T-cell lymphoma), leukemia, thyroid carcinoma, glioma, renal cell carcinoma, chondrosarcoma, glioblastoma, melanoma, neuroblastoma, polycystic ovary syndrome, Kaposi sarcoma, squamous cell carcinoma, leiomyosarcoma, malignant peripheral nerve sheath tumor, Ewing's sarcoma, esophageal neoplasms, colon cancer, lung cancer, breast cancer, pancreatic cancer, stomach cancer, epithelial ovarian cancer, cholectoral cancer, liver cancer, skin cancer, prostate cancer, cervical cancer, ovarian cancer, bladder cancer, oral cavity cancer, and combinations thereof. In other embodiments, use of the system treats one or more inflammatory diseases, conditions, and illnesses, including, but not limited to, autoinflammatory disease (AID), cryopyrin-associated periodic syndrome (CAPS), systemic lupus erythematosus (SLE), inflammatory bowel disease (IBD) and combinations thereof. In some embodiments, use of the system treats one or more cardiac diseases, conditions, and illnesses, including, but not limited to, myocardial infarction, heart failure (e.g., refractory or acute decompensated heart failure), arrythmias, pericarditis (e.g., refractory idiopathic pericarditis), myocarditis, sepsis-induced cardiomyopathy, atherosclerosis, coronary artery disease and combinations thereof. In some embodiments, use of the system treats one or more neurological diseases, conditions, and illnesses, including, but not limited to, acute thrombotic stroke, epilepsy, multiple sclerosis, Alzheimer's Disease and combinations thereof. In some embodiments, use of the system treats one or more ophthalmic diseases, conditions, and illnesses, including, but not limited to, uveitis, scleritis, Sjogren asthenia, dry eye and combinations thereof. In some embodiments, use of the system treats one or more diseases, conditions, and illnesses, including, but not limited to, chronic kidney disease, Type 2 diabetes, gastroesophageal reflux disease (GERD), non-HP-associated peptic ulcer disease, and pulmonary fibrosis.

### C. Miscellaneous Modes of Delivery

### 1. Liposomes

[0660] In some embodiments, nucleic acids encoding a CRISPR gene-editing system targeting a gene selected from IL1R1, IL1R2, IL1RAP, IL1RL1, TGFBR1, TGFBR2, IL6R, IL6ST, TNFRSF1A, TNFRSF1B, TNFRSF3, TNFRSF4, TNFRSF11A, and combinations thereof (e.g., Cas9 or gRNA) are entrapped in liposomes bearing positive charges on their surface (e.g., lipofectins), which can be tagged with antibodies against cell surface antigens of the target cells. These delivery vehicles can also be used to deliver Cas9 protein/gRNA complexes.

[0661] In some embodiments, the CRISPR gene-editing system comprises one or more RNA-containing compositions. In some embodiments, the CRISPR gene-editing system further comprises one or more liposomes. In some embodiments, said one or more RNA-containing compositions comprises a guide RNA. In some embodiments, said one or more RNA-containing compositions comprises an mRNA. In some embodiments, said one or more RNA-containing compositions comprises an RNP (e.g., Cas9 and a guide RNA).

[0662] In some embodiments, wherein the composition comprises one or more liposomes collectively encapsulating (i) the RNA-guided nuclease or the nucleic acid encoding the RNA-guided nuclease and (ii) the at least one guide RNA or the nucleic acid encoding the at least one guide RNA. In some embodiments, the one or more liposomes comprises a first plurality of liposomes encapsulating the RNA-guided nuclease or a nucleic acid encoding an RNA-guided nuclease and a second plurality of liposomes encapsulating the at least one guide RNA or a nucleic acid encoding at least one guide RNA.

[0663] In some embodiments, use of the CRISPR gene-editing system further comprising one or more LNPs to target a gene selected from IL1R1, IL1RAP, TGFBR1, TGFBR2, IL6R, IL6ST, TNFRSF1A, TNFRSF1B, TNFRSF3, TNFRSF4, TNFRSF11A, and combinations thereof is therapeutic.

[0664] In one aspect, use of the CRISPR gene-editing system further comprising one or more liposomes to target TGFBR1 and/or TGFBR2 is therapeutic. In some embodiments, use of the system treats one or more joint disease or illness or one or more back or spine conditions or disorders. In some embodiments, use of the system treats one or more musculoskeletal diseases, conditions, and illnesses, including, but not limited to, Loeys-Dietz Syndrome, osteoarthritis, Marfan syndrome, aortic aneurysm (e.g., familial thoracic 3 aortic aneurysm), craniofacial abnormalities, and combinations thereof. In other embodiments, use of the system treats neoplastic diseases, conditions, and illnesses, including, but not limited to, pancreatic cancer, multiple self-healing squamous epithelioma (Ferguson-Smith disease), gastrointestinal stromal tumors (GIST), hereditary nonpolyposis colorectal cancer (Lynch Syndrome), metastatic colorectal carcinoma, bone neoplasms, anaplastic carcinoma, spindle-cell carcinoma, lung neoplasms, brain neoplasms, and combinations thereof.

[0665] In some embodiments, the CRISPR gene-editing system further comprising one or more liposomes to target IL1R1 and/or IL1RAP is therapeutic. In some embodiments, use of the system treats one or more joint disease or illness or one or more back or spine conditions or disorders. In some embodiments, use of the system treats one or more musculoskeletal diseases, conditions, and illnesses, including, but not limited to, rheumatoid arthritis, gout, osteoarthritis, osteoporosis, intervertebral disc disease (IVDD), psoriatic arthritis, arthritis, polymyositis, proliferative synovitis, bone neoplasms, sarcoid myopathy, cortex bone disorders, idiopathic scoliosis, tendinopathy, myofibrillar myopathy, enthesis-related arthritis, ankylosing spondylitis, degenerative polyarthritis, arthropathy, osteitis deformans, prolapsed lumbar disc, polymyositis ossificans, idiopathic polymyositis, Luft Disease, adult-onset Still's Disease, osteoarthritis deformans, Bachet's Disease, and combinations thereof. In other embodiments, use of the system treats one or more neoplastic diseases, conditions, and illnesses, including, but not limited to, osteosarcoma, multiple myeloma, lymphoma (e.g., B-cell or cutaneous T-cell lymphoma), leukemia, thyroid carcinoma, glioma, renal cell carcinoma, chondrosarcoma, glioblastoma, melanoma, neuroblastoma, polycystic ovary syndrome, Kaposi sarcoma, squamous cell carcinoma, leiomyosarcoma, malignant peripheral nerve sheath tumor, Ewing's sarcoma, esophageal neoplasms, colon cancer, lung cancer, breast cancer, pancreatic cancer, stomach cancer, epithelial ovarian cancer, colorectal cancer, liver cancer, skin cancer, prostate cancer, cervical cancer, ovarian cancer, bladder cancer, oral cavity cancer, and combinations thereof. In other embodiments, use of the system treats one or more inflammatory diseases, conditions, and illnesses, including, but not limited to, autoinflammatory disease (AID), cryopyrin-associated periodic syndrome (CAPS), systemic lupus erythematosus (SLE), inflammatory bowel disease (IBD) and combinations thereof. In some embodiments, use of the system treats one or more cardiac diseases, conditions, and illnesses, including, but not limited to, myocardial infarction, heart failure (e.g., refractory or acute decompensated heart failure), arrythmias, pericarditis (e.g., refractory idiopathic pericarditis), myocarditis, sepsis-induced cardiomyopathy, atherosclerosis, coronary artery disease and combinations thereof. In some embodiments, use of the system treats one or more neurological diseases, conditions, and illnesses, including, but not limited to, acute thrombotic stroke, epilepsy, multiple sclerosis, Alzheimer's Disease and combinations thereof. In some embodiments, use of the system treats one or more ophthalmic diseases, conditions, and illnesses, including, but not limited to, uveitis, scleritis, Sjogren asthenia, dry eye and combinations thereof. In some embodiments, use of the system treats one or more diseases, conditions, and illnesses, including, but not limited to, chronic kidney disease, Type 2 diabetes, gastroesophageal reflux disease (GERD), non-HP-associated peptic ulcer disease, and pulmonary fibrosis.

### 2. Lipid Nanocrystals (LNC)

[0666] In one aspect, the In one aspect, the present disclosure encompasses means for delivering a CRISPR gene-editing system to a mammalian cell via a lipid nanocrystal (LNC). In some embodiments, a CRISPR gene-editing system is delivered by a LNC. Without wishing to be bound by any particular theory, in certain embodiments, nucleic acids, when present in the nanocrystal, are resistant in aqueous solution to degradation with a nuclease. In other embodiments, proteins are protected from protease degradation while present in the nanocrystal. In some embodiments, proteins and nucleic acids encapsulated by nanocrystal are capable of penetrating the cellular plasma membrane.

[0667] In some embodiments, the CRISPR gene-editing system comprises one or more RNA-containing compositions. In some embodiments, the CRISPR gene-editing system further comprises one or more nanocrystals. In some embodiments, said one or more RNA-containing compositions comprises a guide RNA. In some embodiments, said one or more RNA-containing compositions comprises an mRNA. In some embodiments, said one or more RNA-containing compositions comprises an RNP (e.g., Cas9 and a guide RNA). In some embodiments, said one or more nanocrystals are lipid nanocrystals (LNC).

[0668] In some embodiments, the CRISPR gene-editing system comprises one or more LNCs collectively encapsulating (i) the RNA-guided nuclease or the nucleic acid encoding the RNA-guided nuclease and (ii) the at least one guide RNA or the nucleic acid encoding the at least one guide RNA. In some embodiments, the one or more LNCs comprises a first plurality of LNC encapsulating the RNA-guided nuclease or a nucleic acid encoding an RNA-guided nuclease and a second plurality of LNC encapsulating the at least one guide RNA or a nucleic acid encoding at least one guide RNA.

[0669] In some embodiments, use of the CRISPR gene-editing system further comprising one or more LNPs to target a gene selected from IL1R1, IL1RAP, TGFBR1, TGFBR2, IL6R, IL6ST, TNFRSF1A, TNFRSF1B, TNFRSF3, TNFRSF4, TNFRSF11A, and combinations thereof is therapeutic.

[0670] In one aspect, use of the CRISPR gene-editing system further comprising one or more LNCs to target TGFBR1 and/or TGFBR2 is therapeutic. In some embodiments, use of the system treats one or more joint disease or illness or one or more back or spine conditions or disorders. In some embodiments, use of the system treats one or more musculoskeletal diseases, conditions, and illnesses, including, but not limited to, Loeys-Dietz Syndrome, osteoarthritis, Marfan syndrome, aortic aneurysm (e.g., familial thoracic 3 aortic aneurysm), craniofacial abnormalities, and combinations thereof. In other embodiments, use of the system treats neoplastic diseases, conditions, and illnesses, including, but not limited to, pancreatic cancer, multiple self-healing squamous epithelioma (Ferguson-Smith disease), gastrointestinal stromal tumors (GIST), hereditary nonpolyposis colorectal cancer (Lynch Syndrome), metastatic colorectal carcinoma, bone neoplasms, anaplastic carcinoma, spindle-cell carcinoma, lung neoplasms, brain neoplasms, and combinations thereof.

[0671] In some embodiments, the CRISPR gene-editing system further comprising one or more LNCs to target IL1R1 and/or IL1RAP is therapeutic. In some embodiments, use of the system treats one or more joint disease or illness or one or more back or spine conditions or disorders. In some embodiments, use of the system treats one or more musculoskeletal diseases, conditions, and illnesses, including, but not limited to, rheumatoid arthritis, gout, osteoarthritis, osteoporosis, intervertebral disc disease (IVDD), psoriatic arthritis, arthritis, polymyositis, proliferative synovitis, bone neoplasms, sarcoid myopathy, cortex bone disorders, idiopathic scoliosis, tendinopathy, myofibrillar myopathy, enthesis-related arthritis, ankylosing spondylitis, degenerative polyarthritis, arthropathy, osteitis deformans, prolapsed lumbar disc, polymyositis ossificans, idiopathic polymyositis, Luft Disease, adult-onset Still's Disease, osteoarthritis deformans, Bachet's Disease, and combinations thereof. In other embodiments, use of the system treats one or more neoplastic diseases, conditions, and illnesses, including, but not limited to, osteosarcoma, multiple myeloma, lymphoma (e.g., B-cell or cutaneous T-cell lymphoma), leukemia, thyroid carcinoma, glioma, renal cell carcinoma, chondrosarcoma, glioblastoma, melanoma, neuroblastoma, polycystic ovary syndrome, Kaposi sarcoma, squamous cell carcinoma, leiomyosarcoma, malignant peripheral nerve sheath tumor, Ewing's sarcoma, esophageal neoplasms, colon cancer, lung cancer, breast cancer, pancreatic cancer, stomach cancer, epithelial ovarian cancer, cholectoral cancer, liver cancer, skin cancer, prostate cancer, cervical cancer, ovarian cancer, bladder cancer, oral cavity cancer, and combinations thereof. In other embodiments, use of the system treats one or more inflammatory diseases, conditions, and illnesses, including, but not limited to, autoinflammatory disease (AID), cryopyrin-associated periodic syndrome (CAPS), systemic lupus erythematosus (SLE), inflammatory bowel disease (IBD) and combinations thereof. In some embodiments, use of the system treats one or more cardiac diseases, conditions, and illnesses, including, but not limited to, myocardial infarction, heart failure (e.g., refractory or acute decompensated heart failure), arrythmias, pericarditis (e.g., refractory idiopathic pericarditis), myocarditis, sepsis-induced cardiomyopathy, atherosclerosis, coronary artery disease and combinations thereof. In some embodiments, use of the system treats one or more neurological diseases, conditions, and illnesses, including, but not limited to, acute thrombotic stroke, epilepsy, multiple sclerosis, Alzheimer's Disease and combinations thereof. In some embodiments, use of the system treats one or more ophthalmic diseases, conditions, and illnesses, including, but not limited to, uveitis, scleritis, Sjogren asthenia, dry eye and combinations thereof. In some embodiments, use of the system treats one or more diseases, conditions, and illnesses, including, but not limited to, chronic kidney disease, Type 2 diabetes, gastroesophageal reflux disease (GERD), non-HP-associated peptic ulcer disease, and pulmonary fibrosis.

### VII. Pharmaceutical Compositions

[0672] In one aspect, the present disclosure encompasses pharmaceutical compositions comprising a CRISPR gene-editing system for treatment of a mammal in need thereof. In some embodiments, the CRISPR gene-editing system targets a gene selected from IL1R1, IL1R2, IL1RAP, IL1RL1, TGFBR1, TGFBR2, IL6R, IL6ST, TNFRSF1A, TNFRSF1B, TNFRSF3, TNFRSF4, TNFRSF11A, and combinations thereof. In some embodiments, the mammal is selected from a human, a dog, a horse, and a cat.

### A. IL1A

[0673] In some embodiments, the disclosure provides one or more pharmaceutical compositions targeting an IL1A gene, the composition comprising a plurality of LNPs, wherein the LNPs comprise an RNA-guided nuclease or a nucleic acid encoding an RNA-guided nuclease and at least one guide RNA or a nucleic acid encoding at least one guide RNA targeting an IL1A gene, and an LNP system selected from any one of LNP001 to LNP240. In some embodiments, the at least one guide RNA has a crRNA sequence selected from SEQ ID NOs: 769-786. In some embodiments, the LNP system comprises the steroid component in a molar ratio from about 36 to about 46, or from about 38 to about 42. In some embodiments, the LNP system comprises the steroid component in a molar ratio of about 37, about 38, about 39, about 40, about 41, or about 42. In some embodiments, the steroid component comprises cholesterol. In some embodiments, the steroid component comprises cholesterol and one or more additional steroids, wherein cholesterol is about 60% (w/w) or more, about 65% (w/w) or more, about 70% (w/w) or more, about 75% (w/w) or more, or about 80% (w/w) or more of the steroid component. In some embodiments, the steroid component comprises dexamethasone. In some embodiments, the steroid component comprises a modified cholesterol, e.g., a hydroxy- or alkyl modification. In some embodiments, the steroid component comprises any other steroid disclosed herein. In some embodiments, the LNP system comprises the PEGylated Lipid Component in a molar ratio from about 1.5 to about 2.5. In some embodiments, the PEGylated Lipid Component comprises a PEG2000 lipid. In some embodiments, the PEGylated Lipid Component comprises one or more of DMG-PEG and/or DMG-C-PEG. In some embodiments, the PEGylated Lipid Component comprises one or more of DMG-PEG2000, DMG-C-PEG2000, DSG-PEG2000, C14-PEG2000, C16-PEG2000, and/or C18-PEG2000. In some embodiments, the plurality of LNPs have an average diameter between about 60 nm and about 120 nm. In some embodiments, the concentration of LNPs in the pharmaceutical composition is between 0.001 and 3 mg/ml. In some embodiments, the pharmaceutical composition targeting an IL1A gene is formulated for treating one or more disorders selected from (i) a joint disease or illness (e.g., arthritis, post-traumatic arthritis, osteoarthritis, rheumatoid arthritis, psoriatic arthritis, lupus, ankylosing spondylitis, reactive arthritis, septic arthritis, juvenile idiopathic arthritis, fibromyalgia, crystal arthropathies, gout, pseudogout, or CPPD disease/chondrocalcinosis), (ii) a spinal condition or disorder (e.g. discogenic disease, low back pain, neck pain, lumbar pain, degenerative disc disease, annual ligament tear, herniated disc, spinal facet joint arthritis, intervertebral disc disease, spondylosis, painful scoliosis, or spinal stenosis), (iii) a musculoskeletal disorder (e.g. fibrosis, scarring, infectious intermittent joint effusion, spondylarthritis, plantar fasciitis, degenerative polyarthritis, hemophilic arthropathy, inflammatory myopathy with abundant macrophages, or polymyositis), and/or any combinations thereof.

### B. IL1B

[0674] In some embodiments, the disclosure provides one or more pharmaceutical compositions targeting an IL1B gene, the composition comprising a plurality of LNPs, wherein the LNPs comprise an RNA-guided nuclease or a nucleic acid encoding an RNA-guided nuclease and at least one guide RNA or a nucleic acid encoding at least one guide RNA targeting an IL1B gene, and an LNP system selected from any one of LNP001 to LNP240. In some embodiments, the at least one guide RNA has a crRNA sequence selected from SEQ ID NOs: 787-805. In some embodiments, the LNP system comprises the steroid component in a molar ratio from about 36 to about 46, or from about 38 to about 42. In some embodiments, the LNP system comprises the steroid component in a molar ratio of about 37, about 38, about 39, about 40, about 41, or about 42. In some embodiments, the steroid component comprises cholesterol. In some embodiments, the steroid component comprises cholesterol and one or more additional steroids, wherein cholesterol is about 60% (w/w) or more, about 65% (w/w) or more, about 70% (w/w) or more, about 75% (w/w) or more, or about 80% (w/w) or more of the steroid component. In some embodiments, the steroid component comprises dexamethasone. In some embodiments, the steroid component comprises a modified cholesterol, e.g., a hydroxy- or alkyl modification. In some embodiments, the steroid component comprises any other steroid disclosed herein. In some embodiments, the LNP system comprises the PEGylated Lipid Component in a molar ratio from about 1.5 to about 2.5. In some embodiments, the PEGylated Lipid Component comprises a PEG2000 lipid. In some embodiments, the PEGylated Lipid Component comprises one or more of DMG-PEG and/or DMG-C-PEG. In some embodiments, the PEGylated Lipid Component comprises one or more of DMG-PEG2000, DMG-C-PEG2000, DSG-PEG2000, C14-PEG2000, C16-PEG2000, and/or C18-PEG2000. In some embodiments, the plurality of LNPs have an average diameter between about 60 nm and about 120 nm. In some embodiments, the concentration of LNPs in the pharmaceutical composition is between 0.001 and 3 mg/ml. In some embodiments, the pharmaceutical composition targeting an IL1B gene is formulated for treating one or more disorders selected from (i) a joint disease or illness (e.g., arthritis, post-traumatic arthritis, osteoarthritis, rheumatoid arthritis, psoriatic arthritis, lupus, ankylosing spondylitis, reactive arthritis, septic arthritis, juvenile idiopathic arthritis, fibromyalgia, crystal arthropathies, gout, pseudogout, or CPPD disease/chondrocalcinosis), (ii) a spinal condition or disorder (e.g. discogenic disease, low back pain, neck pain, lumbar pain, degenerative disc disease, annual ligament tear, herniated disc, spinal facet joint arthritis, intervertebral disc disease, spondylosis, painful scoliosis, or spinal stenosis), (iii) a musculoskeletal disorder (e.g. fibrosis, scarring, infectious intermittent joint effusion, spondylarthritis, plantar fasciitis, degenerative polyarthritis, hemophilic arthropathy, inflammatory myopathy with abundant macrophages, or polymyositis), and/or any combinations thereof.

### C. IL1R1

[0675] In some embodiments, the disclosure provides one or more pharmaceutical compositions targeting an IL1R1 gene, the composition comprising a plurality of LNPs, wherein the LNPs comprise an RNA-guided nuclease or a nucleic acid encoding an RNA-guided nuclease and at least one guide RNA or a nucleic acid encoding at least one guide RNA targeting an IL1R1 gene, and an LNP system selected from any one of LNP001 to LNP240. In some embodiments, the at least one guide RNA has a crRNA sequence selected from SEQ ID NOs: 806-839. In some embodiments, the LNP system comprises the steroid component in a molar ratio from about 36 to about 46, or from about 38 to about 42. In some embodiments, the LNP system comprises the steroid component in a molar ratio of about 37, about 38, about 39, about 40, about 41, or about 42. In some embodiments, the steroid component comprises cholesterol. In some embodiments, the steroid component comprises cholesterol and one or more additional steroids, wherein cholesterol is about 60% (w/w) or more, about 65% (w/w) or more, about 70% (w/w) or more, about 75% (w/w) or more, or about 80% (w/w) or more of the steroid component. In some embodiments, the steroid component comprises dexamethasone. In some embodiments, the steroid component comprises a modified cholesterol, e.g., a hydroxy- or alkyl modification. In some embodiments, the steroid component comprises any other steroid disclosed herein. In some embodiments, the LNP system comprises the PEGylated Lipid Component in a molar ratio from about 1.5 to about 2.5. In some embodiments, the PEGylated Lipid Component comprises a PEG2000 lipid. In some embodiments, the PEGylated Lipid Component comprises one or more of DMG-PEG and/or DMG-C-PEG. In some embodiments, the PEGylated Lipid Component comprises one or more of DMG-PEG2000, DMG-C-PEG2000, DSG-PEG2000, C14-PEG2000, C16-PEG2000, and/or C18-PEG2000. In some embodiments, the plurality of LNPs have an average diameter between about 60 nm and about 120 nm. In some embodiments, the concentration of LNPs in the pharmaceutical composition is between 0.001 and 3 mg/ml. In some embodiments, the pharmaceutical composition targeting an IL1R1 gene is formulated for treating one or more disorders selected from (i) a joint disease or illness (e.g., arthritis, post-traumatic arthritis, osteoarthritis, rheumatoid arthritis, psoriatic arthritis, lupus, ankylosing spondylitis, reactive arthritis, septic arthritis, juvenile idiopathic arthritis, fibromyalgia, crystal arthropathies, gout, pseudogout, or CPPD disease/chondrocalcinosis), (ii) a spinal condition or disorder (e.g. discogenic disease, low back pain, neck pain, lumbar pain, degenerative disc disease, annual ligament tear, herniated disc, spinal facet joint arthritis, intervertebral disc disease, spondylosis, painful scoliosis, or spinal stenosis), (iii) a musculoskeletal disorder (e.g. fibrosis, scarring, infectious intermittent joint effusion, spondylarthritis, plantar fasciitis, degenerative polyarthritis, hemophilic arthropathy, inflammatory myopathy with abundant macrophages, or polymyositis), and/or any combinations thereof.

### D. IL1RAP

[0676] In some embodiments, the disclosure provides one or more pharmaceutical compositions targeting an IL1RAP gene, the composition comprising a plurality of LNPs, wherein the LNPs comprise an RNA-guided nuclease or a nucleic acid encoding an RNA-guided nuclease and at least one guide RNA or a nucleic acid encoding at least one guide RNA targeting an IL1RAP gene, and an LNP system selected from any one of LNP001 to LNP240. In some embodiments, the at least one guide RNA has a crRNA sequence selected from SEQ ID NOs: 840-887. In some embodiments, the LNP system comprises the steroid component in a molar ratio from about 36 to about 46, or from about 38 to about 42. In some embodiments, the LNP system comprises the steroid component in a molar ratio of about 37, about 38, about 39, about 40, about 41, or about 42. In some embodiments, the steroid component comprises cholesterol. In some embodiments, the steroid component comprises cholesterol and one or more additional steroids, wherein cholesterol is about 60% (w/w) or more, about 65% (w/w) or more, about 70% (w/w) or more, about 75% (w/w) or more, or about 80% (w/w) or more of the steroid component. In some embodiments, the steroid component comprises dexamethasone. In some embodiments, the steroid component comprises a modified cholesterol, e.g., a hydroxy- or alkyl modification. In some embodiments, the steroid component comprises any other steroid disclosed herein. In some embodiments, the LNP system comprises the PEGylated Lipid Component in a molar ratio from about 1.5 to about 2.5. In some embodiments, the PEGylated Lipid Component comprises a PEG2000 lipid. In some embodiments, the PEGylated Lipid Component comprises one or more of DMG-PEG and/or DMG-C-PEG. In some embodiments, the PEGylated Lipid Component comprises one or more of DMG-PEG2000, DMG-C-PEG2000, DSG-PEG2000, C14-PEG2000, C16-PEG2000, and/or C18-PEG2000. In some embodiments, the plurality of LNPs have an average diameter between about 60 nm and about 120 nm. In some embodiments, the concentration of LNPs in the pharmaceutical composition is between 0.001 and 3 mg/ml. In some embodiments, the pharmaceutical composition targeting an IL1RAP gene is formulated for treating one or more disorders selected from (i) a joint disease or illness (e.g., arthritis, post-traumatic arthritis, osteoarthritis, rheumatoid arthritis, psoriatic arthritis, lupus, ankylosing spondylitis, reactive arthritis, septic arthritis, juvenile idiopathic arthritis, fibromyalgia, crystal arthropathies, gout, pseudogout, or CPPD disease/chondrocalcinosis), (ii) a spinal condition or disorder (e.g. discogenic disease, low back pain, neck pain, lumbar pain, degenerative disc disease, annual ligament tear, herniated disc, spinal facet joint arthritis, intervertebral disc disease, spondylosis, painful scoliosis, or spinal stenosis), (iii) a musculoskeletal disorder (e.g. fibrosis, scarring, infectious intermittent joint effusion, spondylarthritis, plantar fasciitis, degenerative polyarthritis, hemophilic arthropathy, inflammatory myopathy with abundant macrophages, or polymyositis), and/or any combinations thereof.

### E. IL4

[0677] In some embodiments, the disclosure provides one or more pharmaceutical compositions targeting an IL4 gene, the composition comprising a plurality of LNPs, wherein the LNPs comprise an RNA-guided nuclease or a nucleic acid encoding an RNA-guided nuclease and at least one guide RNA or a nucleic acid encoding at least one guide RNA targeting an IL4 gene, and an LNP system selected from any one of LNP001 to LNP240. In some embodiments, the at least one guide RNA has a crRNA sequence selected from SEQ ID NOs: 888-911. In some embodiments, the LNP system comprises the steroid component in a molar ratio from about 36 to about 46, or from about 38 to about 42. In some embodiments, the LNP system comprises the steroid component in a molar ratio of about 37, about 38, about 39, about 40, about 41, or about 42. In some embodiments, the steroid component comprises cholesterol. In some embodiments, the steroid component comprises cholesterol and one or more additional steroids, wherein cholesterol is about 60% (w/w) or more, about 65% (w/w) or more, about 70% (w/w) or more, about 75% (w/w) or more, or about 80% (w/w) or more of the steroid component. In some embodiments, the steroid component comprises dexamethasone. In some embodiments, the steroid component comprises a modified cholesterol, e.g., a hydroxy- or alkyl modification. In some embodiments, the steroid component comprises any other steroid disclosed herein. In some embodiments, the LNP system comprises the PEGylated Lipid Component in a molar ratio from about 1.5 to about 2.5. In some embodiments, the PEGylated Lipid Component comprises a PEG2000 lipid. In some embodiments, the PEGylated Lipid Component comprises one or more of DMG-PEG and/or DMG-C-PEG. In some embodiments, the PEGylated Lipid Component comprises one or more of DMG-PEG2000, DMG-C-PEG2000, DSG-PEG2000, C14-PEG2000, C16-PEG2000, and/or C18-PEG2000. In some embodiments, the plurality of LNPs have an average diameter between about 60 nm and about 120 nm. In some embodiments, the concentration of LNPs in the pharmaceutical composition is between 0.001 and 3 mg/ml. In some embodiments, the pharmaceutical composition targeting an IL4 gene is formulated for treating one or more disorders selected from (i) a joint disease or illness (e.g., arthritis, post-traumatic arthritis, osteoarthritis, rheumatoid arthritis, psoriatic arthritis, lupus, ankylosing spondylitis, reactive arthritis, septic arthritis, juvenile idiopathic arthritis, fibromyalgia, crystal arthropathies, gout, pseudogout, or CPPD disease/chondrocalcinosis), (ii) a spinal condition or disorder (e.g. discogenic disease, low back pain, neck pain, lumbar pain, degenerative disc disease, annual ligament tear, herniated disc, spinal facet joint arthritis, intervertebral disc disease, spondylosis, painful scoliosis, or spinal stenosis), (iii) a musculoskeletal disorder (e.g. fibrosis, scarring, infectious intermittent joint effusion, spondylarthritis, plantar fasciitis, degenerative polyarthritis, hemophilic arthropathy, inflammatory myopathy with abundant macrophages, or polymyositis), and/or any combinations thereof.

### F. IL6R

[0678] In some embodiments, the disclosure provides one or more pharmaceutical compositions targeting an IL6R gene, the composition comprising a plurality of LNPs, wherein the LNPs comprise an RNA-guided nuclease or a nucleic acid encoding an RNA-guided nuclease and at least one guide RNA or a nucleic acid encoding at least one guide RNA targeting an IL6R gene, and an LNP system selected from any one of LNP001 to LNP240. In some embodiments, the at least one guide RNA has a crRNA sequence selected from SEQ ID NOs: 929-963. In some embodiments, the LNP system comprises the steroid component in a molar ratio from about 36 to about 46, or from about 38 to about 42. In some embodiments, the LNP system comprises the steroid component in a molar ratio of about 37, about 38, about 39, about 40, about 41, or about 42. In some embodiments, the steroid component comprises cholesterol. In some embodiments, the steroid component comprises cholesterol and one or more additional steroids, wherein cholesterol is about 60% (w/w) or more, about 65% (w/w) or more, about 70% (w/w) or more, about 75% (w/w) or more, or about 80% (w/w) or more of the steroid component. In some embodiments, the steroid component comprises dexamethasone. In some embodiments, the steroid component comprises a modified cholesterol, e.g., a hydroxy- or alkyl modification. In some embodiments, the steroid component comprises any other steroid disclosed herein. In some embodiments, the LNP system comprises the PEGylated Lipid Component in a molar ratio from about 1.5 to about 2.5. In some embodiments, the PEGylated Lipid Component comprises a PEG2000 lipid. In some embodiments, the PEGylated Lipid Component comprises one or more of DMG-PEG and/or DMG-C-PEG. In some embodiments, the PEGylated Lipid Component comprises one or more of DMG-PEG2000, DMG-C-PEG2000, DSG-PEG2000, C14-PEG2000, C16-PEG2000, and/or C18-PEG2000. In some embodiments, the plurality of LNPs have an average diameter between about 60 nm and about 120 nm. In some embodiments, the concentration of LNPs in the pharmaceutical composition is between 0.001 and 3 mg/ml. In some embodiments, the pharmaceutical composition targeting an IL6R gene is formulated for treating one or more disorders selected from (i) a joint disease or illness (e.g., arthritis, post-traumatic arthritis, osteoarthritis, rheumatoid arthritis, psoriatic arthritis, lupus, ankylosing spondylitis, reactive arthritis, septic arthritis, juvenile idiopathic arthritis, fibromyalgia, crystal arthropathies, gout, pseudogout, or CPPD disease/chondrocalcinosis), (ii) a spinal condition or disorder (e.g. discogenic disease, low back pain, neck pain, lumbar pain, degenerative disc disease, annual ligament tear, herniated disc, spinal facet joint arthritis, intervertebral disc disease, spondylosis, painful scoliosis, or spinal stenosis), (iii) a musculoskeletal disorder (e.g. fibrosis, scarring, infectious intermittent joint effusion, spondylarthritis, plantar fasciitis, degenerative polyarthritis, hemophilic arthropathy, inflammatory myopathy with abundant macrophages, or polymyositis), and/or any combinations thereof.

### G. IL6ST

[0679] In some embodiments, the disclosure provides one or more pharmaceutical compositions targeting an IL6ST gene, the composition comprising a plurality of LNPs, wherein the LNPs comprise an RNA-guided nuclease or a nucleic acid encoding an RNA-guided nuclease and at least one guide RNA or a nucleic acid encoding at least one guide RNA targeting an IL6ST gene, and an LNP system selected from any one of LNP001 to LNP240. In some embodiments, the at least one guide RNA has a crRNA sequence selected from SEQ ID NOs: 964-990. In some embodiments, the LNP system comprises the steroid component in a molar ratio from about 36 to about 46, or from about 38 to about 42. In some embodiments, the LNP system comprises the steroid component in a molar ratio of about 37, about 38, about 39, about 40, about 41, or about 42. In some embodiments, the steroid component comprises cholesterol. In some embodiments, the steroid component comprises cholesterol and one or more additional steroids, wherein cholesterol is about 60% (w/w) or more, about 65% (w/w) or more, about 70% (w/w) or more, about 75% (w/w) or more, or about 80% (w/w) or more of the steroid component. In some embodiments, the steroid component comprises dexamethasone. In some embodiments, the steroid component comprises a modified cholesterol, e.g., a hydroxy- or alkyl modification. In some embodiments, the steroid component comprises any other steroid disclosed herein. In some embodiments, the LNP system comprises the PEGylated Lipid Component in a molar ratio from about 1.5 to about 2.5. In some embodiments, the PEGylated Lipid Component comprises a PEG2000 lipid. In some embodiments, the PEGylated Lipid Component comprises one or more of DMG-PEG and/or DMG-C-PEG. In some embodiments, the PEGylated Lipid Component comprises one or more of DMG-PEG2000, DMG-C-PEG2000, DSG-PEG2000, C14-PEG2000, C16-PEG2000, and/or C18-PEG2000. In some embodiments, the plurality of LNPs have an average diameter between about 60 nm and about 120 nm. In some embodiments, the concentration of LNPs in the pharmaceutical composition is between 0.001 and 3 mg/ml. In some embodiments, the pharmaceutical composition targeting an IL6ST gene is formulated for treating one or more disorders selected from (i) a joint disease or illness (e.g., arthritis, post-traumatic arthritis, osteoarthritis, rheumatoid arthritis, psoriatic arthritis, lupus, ankylosing spondylitis, reactive arthritis, septic arthritis, juvenile idiopathic arthritis, fibromyalgia, crystal arthropathies, gout, pseudogout, or CPPD disease/chondrocalcinosis), (ii) a spinal condition or disorder (e.g. discogenic disease, low back pain, neck pain, lumbar pain, degenerative disc disease, annual ligament tear, herniated disc, spinal facet joint arthritis, intervertebral disc disease, spondylosis, painful scoliosis, or spinal stenosis), (iii) a musculoskeletal disorder (e.g. fibrosis, scarring, infectious intermittent joint effusion, spondylarthritis, plantar fasciitis, degenerative polyarthritis, hemophilic arthropathy, inflammatory myopathy with abundant macrophages, or polymyositis), and/or any combinations thereof.

### H. TNFRSF1A

[0680] In some embodiments, the disclosure provides one or more pharmaceutical compositions targeting an TNFRSF1A gene, the composition comprising a plurality of LNPs, wherein the LNPs comprise an RNA-guided nuclease or a nucleic acid encoding an RNA-guided nuclease and at least one guide RNA or a nucleic acid encoding at least one guide RNA targeting an TNFRSF1A gene, and an LNP system selected from any one of LNP001 to LNP240. In some embodiments, the at least one guide RNA has a crRNA sequence selected from SEQ ID NOs: 2575-2622. In some embodiments, the LNP system comprises the steroid component in a molar ratio from about 36 to about 46, or from about 38 to about 42. In some embodiments, the LNP system comprises the steroid component in a molar ratio of about 37, about 38, about 39, about 40, about 41, or about 42. In some embodiments, the steroid component comprises cholesterol. In some embodiments, the steroid component comprises cholesterol and one or more additional steroids, wherein cholesterol is about 60% (w/w) or more, about 65% (w/w) or more, about 70% (w/w) or more, about 75% (w/w) or more, or about 80% (w/w) or more of the steroid component. In some embodiments, the steroid component comprises dexamethasone. In some embodiments, the steroid component comprises a modified cholesterol, e.g., a hydroxy- or alkyl modification. In some embodiments, the steroid component comprises any other steroid disclosed herein. In some embodiments, the LNP system comprises the PEGylated Lipid Component in a molar ratio from about 1.5 to about 2.5. In some embodiments, the PEGylated Lipid Component comprises a PEG2000 lipid. In some embodiments, the PEGylated Lipid Component comprises one or more of DMG-PEG and/or DMG-C-PEG. In some embodiments, the PEGylated Lipid Component comprises one or more of DMG-PEG2000, DMG-C-PEG2000, DSG-PEG2000, C14-PEG2000, C16-PEG2000, and/or C18-PEG2000. In some embodiments, the plurality of LNPs have an average diameter between about 60 nm and about 120 nm. In some embodiments, the concentration of LNPs in the pharmaceutical composition is between 0.001 and 3 mg/ml. In some embodiments, the pharmaceutical composition targeting an TNFRSF1A gene is formulated for treating one or more disorders selected from (i) a joint disease or illness (e.g., arthritis, post-traumatic arthritis, osteoarthritis, rheumatoid arthritis, psoriatic arthritis, lupus, ankylosing spondylitis, reactive arthritis, septic arthritis, juvenile idiopathic arthritis, fibromyalgia, crystal arthropathies, gout, pseudogout, or CPPD disease/chondrocalcinosis), (ii) a spinal condition or disorder (e.g. discogenic disease, low back pain, neck pain, lumbar pain, degenerative disc disease, annual ligament tear, herniated disc, spinal facet joint arthritis, intervertebral disc disease, spondylosis, painful scoliosis, or spinal stenosis), (iii) a musculoskeletal disorder (e.g. fibrosis, scarring, infectious intermittent joint effusion, spondylarthritis, plantar fasciitis, degenerative polyarthritis, hemophilic arthropathy, inflammatory myopathy with abundant macrophages, or polymyositis), and/or any combinations thereof.

### I. TNFRSF1B

[0681] In some embodiments, the disclosure provides one or more pharmaceutical compositions targeting an TNFRSF1B gene, the composition comprising a plurality of LNPs, wherein the LNPs comprise an RNA-guided nuclease or a nucleic acid encoding an RNA-guided nuclease and at least one guide RNA or a nucleic acid encoding at least one guide RNA targeting an TNFRSF1B gene, and an LNP system selected from any one of LNP001 to LNP240. In some embodiments, the at least one guide RNA has a crRNA sequence selected from SEQ ID NOs: 2623-2670. In some embodiments, the LNP system comprises the steroid component in a molar ratio from about 36 to about 46, or from about 38 to about 42. In some embodiments, the LNP system comprises the steroid component in a molar ratio of about 37, about 38, about 39, about 40, about 41, or about 42. In some embodiments, the steroid component comprises cholesterol. In some embodiments, the steroid component comprises cholesterol and one or more additional steroids, wherein cholesterol is about 60% (w/w) or more, about 65% (w/w) or more, about 70% (w/w) or more, about 75% (w/w) or more, or about 80% (w/w) or more of the steroid component. In some embodiments, the steroid component comprises dexamethasone. In some embodiments, the steroid component comprises a modified cholesterol, e.g., a hydroxy- or alkyl modification. In some embodiments, the steroid component comprises any other steroid disclosed herein. In some embodiments, the LNP system comprises the PEGylated Lipid Component in a molar ratio from about 1.5 to about 2.5. In some embodiments, the PEGylated Lipid Component comprises a PEG2000 lipid. In some embodiments, the PEGylated Lipid Component comprises one or more of DMG-PEG and/or DMG-C-PEG. In some embodiments, the PEGylated Lipid Component comprises one or more of DMG-PEG2000, DMG-C-PEG2000, DSG-PEG2000, C14-PEG2000, C16-PEG2000, and/or C18-PEG2000. In some embodiments, the plurality of LNPs have an average diameter between about 60 nm and about 120 nm. In some embodiments, the concentration of LNPs in the pharmaceutical composition is between 0.001 and 3 mg/ml. In some embodiments, the pharmaceutical composition targeting an TNFRSF1B gene is formulated for treating one or more disorders selected from (i) a joint disease or illness (e.g., arthritis, post-traumatic arthritis, osteoarthritis, rheumatoid arthritis, psoriatic arthritis, lupus, ankylosing spondylitis, reactive arthritis, septic arthritis, juvenile idiopathic arthritis, fibromyalgia, crystal arthropathies, gout, pseudogout, or CPPD disease/chondrocalcinosis), (ii) a spinal condition or disorder (e.g. discogenic disease, low back pain, neck pain, lumbar pain, degenerative disc disease, annual ligament tear, herniated disc, spinal facet joint arthritis, intervertebral disc disease, spondylosis, painful scoliosis, or spinal stenosis), (iii) a musculoskeletal disorder (e.g. fibrosis, scarring, infectious intermittent joint effusion, spondylarthritis, plantar fasciitis, degenerative polyarthritis, hemophilic arthropathy, inflammatory myopathy with abundant macrophages, or polymyositis), and/or any combinations thereof.

### J. TNFRSF3

[0682] In some embodiments, the disclosure provides one or more pharmaceutical compositions targeting an TNFRSF3 gene, the composition comprising a plurality of LNPs, wherein the LNPs comprise an RNA-guided nuclease or a nucleic acid encoding an RNA-guided nuclease and at least one guide RNA or a nucleic acid encoding at least one guide RNA targeting an TNFRSF3 gene, and an LNP system selected from any one of LNP001 to LNP240. In some embodiments, the at least one guide RNA has a crRNA sequence selected from SEQ ID NOs: 1664-1684. In some embodiments, the LNP system comprises the steroid component in a molar ratio from about 36 to about 46, or from about 38 to about 42. In some embodiments, the LNP system comprises the steroid component in a molar ratio of about 37, about 38, about 39, about 40, about 41, or about 42. In some embodiments, the steroid component comprises cholesterol. In some embodiments, the steroid component comprises cholesterol and one or more additional steroids, wherein cholesterol is about 60% (w/w) or more, about 65% (w/w) or more, about 70% (w/w) or more, about 75% (w/w) or more, or about 80% (w/w) or more of the steroid component. In some embodiments, the steroid component comprises dexamethasone. In some embodiments, the steroid component comprises a modified cholesterol, e.g., a hydroxy- or alkyl modification. In some embodiments, the steroid component comprises any other steroid disclosed herein. In some embodiments, the LNP system comprises the PEGylated Lipid Component in a molar ratio from about 1.5 to about 2.5. In some embodiments, the PEGylated Lipid Component comprises a PEG2000 lipid. In some embodiments, the PEGylated Lipid Component comprises one or more of DMG-PEG and/or DMG-C-PEG. In some embodiments, the PEGylated Lipid Component comprises one or more of DMG-PEG2000, DMG-C-PEG2000, DSG-PEG2000, C14-PEG2000, C16-PEG2000, and/or C18-PEG2000. In some embodiments, the plurality of LNPs have an average diameter between about 60 nm and about 120 nm. In some embodiments, the concentration of LNPs in the pharmaceutical composition is between 0.001 and 3 mg/ml. In some embodiments, the pharmaceutical composition targeting an TNFRSF3 gene is formulated for treating one or more disorders selected from (i) a joint disease or illness (e.g., arthritis, post-traumatic arthritis, osteoarthritis, rheumatoid arthritis, psoriatic arthritis, lupus, ankylosing spondylitis, reactive arthritis, septic arthritis, juvenile idiopathic arthritis, fibromyalgia, crystal arthropathies, gout, pseudogout, or CPPD disease/chondrocalcinosis), (ii) a spinal condition or disorder (e.g. discogenic disease, low back pain, neck pain, lumbar pain, degenerative disc disease, annual ligament tear, herniated disc, spinal facet joint arthritis, intervertebral disc disease, spondylosis, painful scoliosis, or spinal stenosis), (iii) a musculoskeletal disorder (e.g. fibrosis, scarring, infectious intermittent joint effusion, spondylarthritis, plantar fasciitis, degenerative polyarthritis, hemophilic arthropathy, inflammatory myopathy with abundant macrophages, or polymyositis), and/or any combinations thereof.

### K. TNFRSF4

[0683] In some embodiments, the disclosure provides one or more pharmaceutical compositions targeting an TNFRSF4 gene, the composition comprising a plurality of LNPs, wherein the LNPs comprise an RNA-guided nuclease or a nucleic acid encoding an RNA-guided nuclease and at least one guide RNA or a nucleic acid encoding at least one guide RNA targeting an TNFRSF4 gene, and an LNP system selected from any one of LNP001 to LNP240. In some embodiments, the at least one guide RNA has a crRNA sequence selected from SEQ ID NOs: 1685-1711. In some embodiments, the LNP system comprises the steroid component in a molar ratio from about 36 to about 46, or from about 38 to about 42. In some embodiments, the LNP system comprises the steroid component in a molar ratio of about 37, about 38, about 39, about 40, about 41, or about 42. In some embodiments, the steroid component comprises cholesterol. In some embodiments, the steroid component comprises cholesterol and one or more additional steroids, wherein cholesterol is about 60% (w/w) or more, about 65% (w/w) or more, about 70% (w/w) or more, about 75% (w/w) or more, or about 80% (w/w) or more of the steroid component. In some embodiments, the steroid component comprises dexamethasone. In some embodiments, the steroid component comprises a modified cholesterol, e.g., a hydroxy- or alkyl modification. In some embodiments, the steroid component comprises any other steroid disclosed herein. In some embodiments, the LNP system comprises the PEGylated Lipid Component in a molar ratio from about 1.5 to about 2.5. In some embodiments, the PEGylated Lipid Component comprises a PEG2000 lipid. In some embodiments, the PEGylated Lipid Component comprises one or more of DMG-PEG and/or DMG-C-PEG. In some embodiments, the PEGylated Lipid Component comprises one or more of DMG-PEG2000, DMG-C-PEG2000, DSG-PEG2000, C14-PEG2000, C16-PEG2000, and/or C18-PEG2000. In some embodiments, the plurality of LNPs have an average diameter between about 60 nm and about 120 nm. In some embodiments, the concentration of LNPs in the pharmaceutical composition is between 0.001 and 3 mg/ml. In some embodiments, the pharmaceutical composition targeting an TNFRSF4 gene is formulated for treating one or more disorders selected from (i) a joint disease or illness (e.g., arthritis, post-traumatic arthritis, osteoarthritis, rheumatoid arthritis, psoriatic arthritis, lupus, ankylosing spondylitis, reactive arthritis, septic arthritis, juvenile idiopathic arthritis, fibromyalgia, crystal arthropathies, gout, pseudogout, or CPPD disease/chondrocalcinosis), (ii) a spinal condition or disorder (e.g. discogenic disease, low back pain, neck pain, lumbar pain, degenerative disc disease, annual ligament tear, herniated disc, spinal facet joint arthritis, intervertebral disc disease, spondylosis, painful scoliosis, or spinal stenosis), (iii) a musculoskeletal disorder (e.g. fibrosis, scarring, infectious intermittent joint effusion, spondylarthritis, plantar fasciitis, degenerative polyarthritis, hemophilic arthropathy, inflammatory myopathy with abundant macrophages, or polymyositis), and/or any combinations thereof.

### L. TNFRSF11A

[0684] In some embodiments, the disclosure provides one or more pharmaceutical compositions targeting an TNFRSF11A gene, the composition comprising a plurality of LNPs, wherein the LNPs comprise an RNA-guided nuclease or a nucleic acid encoding an RNA-guided nuclease and at least one guide RNA or a nucleic acid encoding at least one guide RNA targeting an TNFRSF11A gene, and an LNP system selected from any one of LNP001 to LNP240. In some embodiments, the at least one guide RNA has a crRNA sequence selected from SEQ ID NOs: 1711-1759. In some embodiments, the LNP system comprises the steroid component in a molar ratio from about 36 to about 46, or from about 38 to about 42. In some embodiments, the LNP system comprises the steroid component in a molar ratio of about 37, about 38, about 39, about 40, about 41, or about 42. In some embodiments, the steroid component comprises cholesterol. In some embodiments, the steroid component comprises cholesterol and one or more additional steroids, wherein cholesterol is about 60% (w/w) or more, about 65% (w/w) or more, about 70% (w/w) or more, about 75% (w/w) or more, or about 80% (w/w) or more of the steroid component. In some embodiments, the steroid component comprises dexamethasone. In some embodiments, the steroid component comprises a modified cholesterol, e.g., a hydroxy- or alkyl modification. In some embodiments, the steroid component comprises any other steroid disclosed herein. In some embodiments, the LNP system comprises the PEGylated Lipid Component in a molar ratio from about 1.5 to about 2.5. In some embodiments, the PEGylated Lipid Component comprises a PEG2000 lipid. In some embodiments, the PEGylated Lipid Component comprises one or more of DMG-PEG and/or DMG-C-PEG. In some embodiments, the PEGylated Lipid Component comprises one or more of DMG-PEG2000, DMG-C-PEG2000, DSG-PEG2000, C14-PEG2000, C16-PEG2000, and/or C18-PEG2000. In some embodiments, the plurality of LNPs have an average diameter between about 60 nm and about 120 nm. In some embodiments, the concentration of LNPs in the pharmaceutical composition is between 0.001 and 3 mg/ml. In some embodiments, the pharmaceutical composition targeting an TNFRSF11A gene is formulated for treating one or more disorders selected from (i) a joint disease or illness (e.g., arthritis, post-traumatic arthritis, osteoarthritis, rheumatoid arthritis, psoriatic arthritis, lupus, ankylosing spondylitis, reactive arthritis, septic arthritis, juvenile idiopathic arthritis, fibromyalgia, crystal arthropathies, gout, pseudogout, or CPPD disease/chondrocalcinosis), (ii) a spinal condition or disorder (e.g. discogenic disease, low back pain, neck pain, lumbar pain, degenerative disc disease, annual ligament tear, herniated disc, spinal facet joint arthritis, intervertebral disc disease, spondylosis, painful scoliosis, or spinal stenosis), (iii) a musculoskeletal disorder (e.g. fibrosis, scarring, infectious intermittent joint effusion, spondylarthritis, plantar fasciitis, degenerative polyarthritis, hemophilic arthropathy, inflammatory myopathy with abundant macrophages, or polymyositis), and/or any combinations thereof.

### M. ADAM17

[0685] In some embodiments, the disclosure provides one or more pharmaceutical compositions targeting an ADAM17 gene, the composition comprising a plurality of LNPs, wherein the LNPs comprise an RNA-guided nuclease or a nucleic acid encoding an RNA-guided nuclease and at least one guide RNA or a nucleic acid encoding at least one guide RNA targeting an ADAM17 gene, and an LNP system selected from any one of LNP001 to LNP240. In some embodiments, the at least one guide RNA has a crRNA sequence selected from SEQ ID NOs: 1-48. In some embodiments, the LNP system comprises the steroid component in a molar ratio from about 36 to about 46, or from about 38 to about 42. In some embodiments, the LNP system comprises the steroid component in a molar ratio of about 37, about 38, about 39, about 40, about 41, or about 42. In some embodiments, the steroid component comprises cholesterol. In some embodiments, the steroid component comprises cholesterol and one or more additional steroids, wherein cholesterol is about 60% (w/w) or more, about 65% (w/w) or more, about 70% (w/w) or more, about 75% (w/w) or more, or about 80% (w/w) or more of the steroid component. In some embodiments, the steroid component comprises dexamethasone. In some embodiments, the steroid component comprises a modified cholesterol, e.g., a hydroxy- or alkyl modification. In some embodiments, the steroid component comprises any other steroid disclosed herein. In some embodiments, the LNP system comprises the PEGylated Lipid Component in a molar ratio from about 1.5 to about 2.5. In some embodiments, the PEGylated Lipid Component comprises a PEG2000 lipid. In some embodiments, the PEGylated Lipid Component comprises one or more of DMG-PEG and/or DMG-C-PEG. In some embodiments, the PEGylated Lipid Component comprises one or more of DMG-PEG2000, DMG-C-PEG2000, DSG-PEG2000, C14-PEG2000, C16-PEG2000, and/or C18-PEG2000. In some embodiments, the plurality of LNPs have an average diameter between about 60 nm and about 120 nm. In some embodiments, the concentration of LNPs in the pharmaceutical composition is between 0.001 and 3 mg/ml. In some embodiments, the pharmaceutical composition targeting an ADAM17 gene is formulated for treating one or more disorders selected from (i) a joint disease or illness (e.g., arthritis, post-traumatic arthritis, osteoarthritis, rheumatoid arthritis, psoriatic arthritis, lupus, ankylosing spondylitis, reactive arthritis, septic arthritis, juvenile idiopathic arthritis, fibromyalgia, crystal arthropathies, gout, pseudogout, or CPPD disease/chondrocalcinosis), (ii) a spinal condition or disorder (e.g. discogenic disease, low back pain, neck pain, lumbar pain, degenerative disc disease, annual ligament tear, herniated disc, spinal facet joint arthritis, intervertebral disc disease, spondylosis, painful scoliosis, or spinal stenosis), (iii) a musculoskeletal disorder (e.g. fibrosis, scarring, infectious intermittent joint effusion, spondylarthritis, plantar fasciitis, degenerative polyarthritis, hemophilic arthropathy, inflammatory myopathy with abundant macrophages, or polymyositis), and/or any combinations thereof.

### N. ADAMTS1

[0686] In some embodiments, the disclosure provides one or more pharmaceutical compositions targeting an ADAMTS1 gene, the composition comprising a plurality of LNPs, wherein the LNPs comprise an RNA-guided nuclease or a nucleic acid encoding an RNA-guided nuclease and at least one guide RNA or a nucleic acid encoding at least one guide RNA targeting an ADAMTS1 gene, and an LNP system selected from any one of LNP001 to LNP240. In some embodiments, the at least one guide RNA has a crRNA sequence selected from SEQ ID NOs: 49-96. In some embodiments, the LNP system comprises the steroid component in a molar ratio from about 36 to about 46, or from about 38 to about 42. In some embodiments, the LNP system comprises the steroid component in a molar ratio of about 37, about 38, about 39, about 40, about 41, or about 42. In some embodiments, the steroid component comprises cholesterol. In some embodiments, the steroid component comprises cholesterol and one or more additional steroids, wherein cholesterol is about 60% (w/w) or more, about 65% (w/w) or more, about 70% (w/w) or more, about 75% (w/w) or more, or about 80% (w/w) or more of the steroid component. In some embodiments, the steroid component comprises dexamethasone. In some embodiments, the steroid component comprises a modified cholesterol, e.g., a hydroxy- or alkyl modification. In some embodiments, the steroid component comprises any other steroid disclosed herein. In some embodiments, the LNP system comprises the PEGylated Lipid Component in a molar ratio from about 1.5 to about 2.5. In some embodiments, the PEGylated Lipid Component comprises a PEG2000 lipid. In some embodiments, the PEGylated Lipid Component comprises one or more of DMG-PEG and/or DMG-C-PEG. In some embodiments, the PEGylated Lipid Component comprises one or more of DMG-PEG2000, DMG-C-PEG2000, DSG-PEG2000, C14-PEG2000, C16-PEG2000, and/or C18-PEG2000. In some embodiments, the plurality of LNPs have an average diameter between about 60 nm and about 120 nm. In some embodiments, the concentration of LNPs in the pharmaceutical composition is between 0.001 and 3 mg/ml. In some embodiments, the pharmaceutical composition targeting an ADAMTS1 gene is formulated for treating one or more disorders selected from (i) a joint disease or illness (e.g., arthritis, post-traumatic arthritis, osteoarthritis, rheumatoid arthritis, psoriatic arthritis, lupus, ankylosing spondylitis, reactive arthritis, septic arthritis, juvenile idiopathic arthritis, fibromyalgia, crystal arthropathies, gout, pseudogout, or CPPD disease/chondrocalcinosis), (ii) a spinal condition or disorder (e.g. discogenic disease, low back pain, neck pain, lumbar pain, degenerative disc disease, annual ligament tear, herniated disc, spinal facet joint arthritis, intervertebral disc disease, spondylosis, painful scoliosis, or spinal stenosis), (iii) a musculoskeletal disorder (e.g. fibrosis, scarring, infectious intermittent joint effusion, spondylarthritis, plantar fasciitis, degenerative polyarthritis, hemophilic arthropathy, inflammatory myopathy with abundant macrophages, or polymyositis), and/or any combinations thereof.

### O. ADAMTS5

[0687] In some embodiments, the disclosure provides one or more pharmaceutical compositions targeting an ADAMTS1 gene, the composition comprising a plurality of LNPs, wherein the LNPs comprise an RNA-guided nuclease or a nucleic acid encoding an RNA-guided nuclease and at least one guide RNA or a nucleic acid encoding at least one guide RNA targeting an ADAMTS1 gene, and an LNP system selected from any one of LNP001 to LNP240. In some embodiments, the at least one guide RNA has a crRNA sequence selected from SEQ ID NOs: 97-144. In some embodiments, the LNP system comprises the steroid component in a molar ratio from about 36 to about 46, or from about 38 to about 42. In some embodiments, the LNP system comprises the steroid component in a molar ratio of about 37, about 38, about 39, about 40, about 41, or about 42. In some embodiments, the steroid component comprises cholesterol. In some embodiments, the steroid component comprises cholesterol and one or more additional steroids, wherein cholesterol is about 60% (w/w) or more, about 65% (w/w) or more, about 70% (w/w) or more, about 75% (w/w) or more, or about 80% (w/w) or more of the steroid component. In some embodiments, the steroid component comprises dexamethasone. In some embodiments, the steroid component comprises a modified cholesterol, e.g., a hydroxy- or alkyl modification. In some embodiments, the steroid component comprises any other steroid disclosed herein. In some embodiments, the LNP system comprises the PEGylated Lipid Component in a molar ratio from about 1.5 to about 2.5. In some embodiments, the PEGylated Lipid Component comprises a PEG2000 lipid. In some embodiments, the PEGylated Lipid Component comprises one or more of DMG-PEG and/or DMG-C-PEG. In some embodiments, the PEGylated Lipid Component comprises one or more of DMG-PEG2000, DMG-C-PEG2000, DSG-PEG2000, C14-PEG2000, C16-PEG2000, and/or C18-PEG2000. In some embodiments, the plurality of LNPs have an average diameter between about 60 nm and about 120 nm. In some embodiments, the concentration of LNPs in the pharmaceutical composition is between 0.001 and 3 mg/ml. In some embodiments, the pharmaceutical composition targeting an ADAMTS1 gene is formulated for treating one or more disorders selected from (i) a joint disease or illness (e.g., arthritis, post-traumatic arthritis, osteoarthritis, rheumatoid arthritis, psoriatic arthritis, lupus, ankylosing spondylitis, reactive arthritis, septic arthritis, juvenile idiopathic arthritis, fibromyalgia, crystal arthropathies, gout, pseudogout, or CPPD disease/chondrocalcinosis), (ii) a spinal condition or disorder (e.g. discogenic disease, low back pain, neck pain, lumbar pain, degenerative disc disease, annual ligament tear, herniated disc, spinal facet joint arthritis, intervertebral disc disease, spondylosis, painful scoliosis, or spinal stenosis), (iii) a musculoskeletal disorder (e.g. fibrosis, scarring, infectious intermittent joint effusion, spondylarthritis, plantar fasciitis, degenerative polyarthritis, hemophilic arthropathy, inflammatory myopathy with abundant macrophages, or polymyositis), and/or any combinations thereof.

### P. ADM

[0688] In some embodiments, the disclosure provides one or more pharmaceutical compositions targeting an ADM gene, the composition comprising a plurality of LNPs, wherein the LNPs comprise an RNA-guided nuclease or a nucleic acid encoding an RNA-guided nuclease and at least one guide RNA or a nucleic acid encoding at least one guide RNA targeting an ADM gene, and an LNP system selected from any one of LNP001 to LNP240. In some embodiments, the at least one guide RNA has a crRNA sequence selected from SEQ ID NOs: 145-192. In some embodiments, the LNP system comprises the steroid component in a molar ratio from about 36 to about 46, or from about 38 to about 42. In some embodiments, the LNP system comprises the steroid component in a molar ratio of about 37, about 38, about 39, about 40, about 41, or about 42. In some embodiments, the steroid component comprises cholesterol. In some embodiments, the steroid component comprises cholesterol and one or more additional steroids, wherein cholesterol is about 60% (w/w) or more, about 65% (w/w) or more, about 70% (w/w) or more, about 75% (w/w) or more, or about 80% (w/w) or more of the steroid component. In some embodiments, the steroid component comprises dexamethasone. In some embodiments, the steroid component comprises a modified cholesterol, e.g., a hydroxy- or alkyl modification. In some embodiments, the steroid component comprises any other steroid disclosed herein. In some embodiments, the LNP system comprises the PEGylated Lipid Component in a molar ratio from about 1.5 to about 2.5. In some embodiments, the PEGylated Lipid Component comprises a PEG2000 lipid. In some embodiments, the PEGylated Lipid Component comprises one or more of DMG-PEG and/or DMG-C-PEG. In some embodiments, the PEGylated Lipid Component comprises one or more of DMG-PEG2000, DMG-C-PEG2000, DSG-PEG2000, C14-PEG2000, C16-PEG2000, and/or C18-PEG2000. In some embodiments, the plurality of LNPs have an average diameter between about 60 nm and about 120 nm. In some embodiments, the concentration of LNPs in the pharmaceutical composition is between 0.001 and 3 mg/ml. In some embodiments, the pharmaceutical composition targeting an ADM gene is formulated for treating one or more disorders selected from (i) a joint disease or illness (e.g., arthritis, post-traumatic arthritis, osteoarthritis, rheumatoid arthritis, psoriatic arthritis, lupus, ankylosing spondylitis, reactive arthritis, septic arthritis, juvenile idiopathic arthritis, fibromyalgia, crystal arthropathies, gout, pseudogout, or CPPD disease/chondrocalcinosis), (ii) a spinal condition or disorder (e.g. discogenic disease, low back pain, neck pain, lumbar pain, degenerative disc disease, annual ligament tear, herniated disc, spinal facet joint arthritis, intervertebral disc disease, spondylosis, painful scoliosis, or spinal stenosis), (iii) a musculoskeletal disorder (e.g. fibrosis, scarring, infectious intermittent joint effusion, spondylarthritis, plantar fasciitis, degenerative polyarthritis, hemophilic arthropathy, inflammatory myopathy with abundant macrophages, or polymyositis), and/or any combinations thereof.

### Q. ATP1A1

[0689] In some embodiments, the disclosure provides one or more pharmaceutical compositions targeting an ATP1A1 gene, the composition comprising a plurality of LNPs, wherein the LNPs comprise an RNA-guided nuclease or a nucleic acid encoding an RNA-guided nuclease and at least one guide RNA or a nucleic acid encoding at least one guide RNA targeting an ATP1A1 gene, and an LNP system selected from any one of LNP001 to LNP240. In some embodiments, the at least one guide RNA has a crRNA sequence selected from SEQ ID NOs: 193-240. In some embodiments, the LNP system comprises the steroid component in a molar ratio from about 36 to about 46, or from about 38 to about 42. In some embodiments, the LNP system comprises the steroid component in a molar ratio of about 37, about 38, about 39, about 40, about 41, or about 42. In some embodiments, the steroid component comprises cholesterol. In some embodiments, the steroid component comprises cholesterol and one or more additional steroids, wherein cholesterol is about 60% (w/w) or more, about 65% (w/w) or more, about 70% (w/w) or more, about 75% (w/w) or more, or about 80% (w/w) or more of the steroid component. In some embodiments, the steroid component comprises dexamethasone. In some embodiments, the steroid component comprises a modified cholesterol, e.g., a hydroxy- or alkyl modification. In some embodiments, the steroid component comprises any other steroid disclosed herein. In some embodiments, the LNP system comprises the PEGylated Lipid Component in a molar ratio from about 1.5 to about 2.5. In some embodiments, the PEGylated Lipid Component comprises a PEG2000 lipid. In some embodiments, the PEGylated Lipid Component comprises one or more of DMG-PEG and/or DMG-C-PEG. In some embodiments, the PEGylated Lipid Component comprises one or more of DMG-PEG2000, DMG-C-PEG2000, DSG-PEG2000, C14-PEG2000, C16-PEG2000, and/or C18-PEG2000. In some embodiments, the plurality of LNPs have an average diameter between about 60 nm and about 120 nm. In some embodiments, the concentration of LNPs in the pharmaceutical composition is between 0.001 and 3 mg/ml. In some embodiments, the pharmaceutical composition targeting an ATP1A1 gene is formulated for treating one or more disorders selected from (i) a joint disease or illness (e.g., arthritis, post-traumatic arthritis, osteoarthritis, rheumatoid arthritis, psoriatic arthritis, lupus, ankylosing spondylitis, reactive arthritis, septic arthritis, juvenile idiopathic arthritis, fibromyalgia, crystal arthropathies, gout, pseudogout, or CPPD disease/chondrocalcinosis), (ii) a spinal condition or disorder (e.g. discogenic disease, low back pain, neck pain, lumbar pain, degenerative disc disease, annual ligament tear, herniated disc, spinal facet joint arthritis, intervertebral disc disease, spondylosis, painful scoliosis, or spinal stenosis), (iii) a musculoskeletal disorder (e.g. fibrosis, scarring, infectious intermittent joint effusion, spondylarthritis, plantar fasciitis, degenerative polyarthritis, hemophilic arthropathy, inflammatory myopathy with abundant macrophages, or polymyositis), and/or any combinations thereof.

### R. BDNF

[0690] In some embodiments, the disclosure provides one or more pharmaceutical compositions targeting an BDNF gene, the composition comprising a plurality of LNPs, wherein the LNPs comprise an RNA-guided nuclease or a nucleic acid encoding an RNA-guided nuclease and at least one guide RNA or a nucleic acid encoding at least one guide RNA targeting an BDNF gene, and an LNP system selected from any one of LNP001 to LNP240. In some embodiments, the at least one guide RNA has a crRNA sequence selected from SEQ ID NOs: 241-281. In some embodiments, the LNP system comprises the steroid component in a molar ratio from about 36 to about 46, or from about 38 to about 42. In some embodiments, the LNP system comprises the steroid component in a molar ratio of about 37, about 38, about 39, about 40, about 41, or about 42. In some embodiments, the steroid component comprises cholesterol. In some embodiments, the steroid component comprises cholesterol and one or more additional steroids, wherein cholesterol is about 60% (w/w) or more, about 65% (w/w) or more, about 70% (w/w) or more, about 75% (w/w) or more, or about 80% (w/w) or more of the steroid component. In some embodiments, the steroid component comprises dexamethasone. In some embodiments, the steroid component comprises a modified cholesterol, e.g., a hydroxy- or alkyl modification. In some embodiments, the steroid component comprises any other steroid disclosed herein. In some embodiments, the LNP system comprises the PEGylated Lipid Component in a molar ratio from about 1.5 to about 2.5. In some embodiments, the PEGylated Lipid Component comprises a PEG2000 lipid. In some embodiments, the PEGylated Lipid Component comprises one or more of DMG-PEG and/or DMG-C-PEG. In some embodiments, the PEGylated Lipid Component comprises one or more of DMG-PEG2000, DMG-C-PEG2000, DSG-PEG2000, C14-PEG2000, C16-PEG2000, and/or C18-PEG2000. In some embodiments, the plurality of LNPs have an average diameter between about 60 nm and about 120 nm. In some embodiments, the concentration of LNPs in the pharmaceutical composition is between 0.001 and 3 mg/ml. In some embodiments, the pharmaceutical composition targeting an BDNF gene is formulated for treating one or more disorders selected from (i) a joint disease or illness (e.g., arthritis, post-traumatic arthritis, osteoarthritis, rheumatoid arthritis, psoriatic arthritis, lupus, ankylosing spondylitis, reactive arthritis, septic arthritis, juvenile idiopathic arthritis, fibromyalgia, crystal arthropathies, gout, pseudogout, or CPPD disease/chondrocalcinosis), (ii) a spinal condition or disorder (e.g. discogenic disease, low back pain, neck pain, lumbar pain, degenerative disc disease, annual ligament tear, herniated disc, spinal facet joint arthritis, intervertebral disc disease, spondylosis, painful scoliosis, or spinal stenosis), (iii) a musculoskeletal disorder (e.g. fibrosis, scarring, infectious intermittent joint effusion, spondylarthritis, plantar fasciitis, degenerative polyarthritis, hemophilic arthropathy, inflammatory myopathy with abundant macrophages, or polymyositis), and/or any combinations thereof.

### S. CALCA

[0691] In some embodiments, the disclosure provides one or more pharmaceutical compositions targeting an CALCA gene, the composition comprising a plurality of LNPs, wherein the LNPs comprise an RNA-guided nuclease or a nucleic acid encoding an RNA-guided nuclease and at least one guide RNA or a nucleic acid encoding at least one guide RNA targeting an CALCA gene, and an LNP system selected from any one of LNP001 to LNP240. In some embodiments, the at least one guide RNA has a crRNA sequence selected from SEQ ID NOs: 282-301. In some embodiments, the LNP system comprises the steroid component in a molar ratio from about 36 to about 46, or from about 38 to about 42. In some embodiments, the LNP system comprises the steroid component in a molar ratio of about 37, about 38, about 39, about 40, about 41, or about 42. In some embodiments, the steroid component comprises cholesterol. In some embodiments, the steroid component comprises cholesterol and one or more additional steroids, wherein cholesterol is about 60% (w/w) or more, about 65% (w/w) or more, about 70% (w/w) or more, about 75% (w/w) or more, or about 80% (w/w) or more of the steroid component. In some embodiments, the steroid component comprises dexamethasone. In some embodiments, the steroid component comprises a modified cholesterol, e.g., a hydroxy- or alkyl modification. In some embodiments, the steroid component comprises any other steroid disclosed herein. In some embodiments, the LNP system comprises the PEGylated Lipid Component in a molar ratio from about 1.5 to about 2.5. In some embodiments, the PEGylated Lipid Component comprises a PEG2000 lipid. In some embodiments, the PEGylated Lipid Component comprises one or more of DMG-PEG and/or DMG-C-PEG. In some embodiments, the PEGylated Lipid Component comprises one or more of DMG-PEG2000, DMG-C-PEG2000, DSG-PEG2000, C14-PEG2000, C16-PEG2000, and/or C18-PEG2000. In some embodiments, the plurality of LNPs have an average diameter between about 60 nm and about 120 nm. In some embodiments, the concentration of LNPs in the pharmaceutical composition is between 0.001 and 3 mg/ml. In some embodiments, the pharmaceutical composition targeting an CALCA gene is formulated for treating one or more disorders selected from (i) a joint disease or illness (e.g., arthritis, post-traumatic arthritis, osteoarthritis, rheumatoid arthritis, psoriatic arthritis, lupus, ankylosing spondylitis, reactive arthritis, septic arthritis, juvenile idiopathic arthritis, fibromyalgia, crystal arthropathies, gout, pseudogout, or CPPD disease/chondrocalcinosis), (ii) a spinal condition or disorder (e.g. discogenic disease, low back pain, neck pain, lumbar pain, degenerative disc disease, annual ligament tear, herniated disc, spinal facet joint arthritis, intervertebral disc disease, spondylosis, painful scoliosis, or spinal stenosis), (iii) a musculoskeletal disorder (e.g. fibrosis, scarring, infectious intermittent joint effusion, spondylarthritis, plantar fasciitis, degenerative polyarthritis, hemophilic arthropathy, inflammatory myopathy with abundant macrophages, or polymyositis), and/or any combinations thereof.

### T. CALCB

[0692] In some embodiments, the disclosure provides one or more pharmaceutical compositions targeting an CALCB gene, the composition comprising a plurality of LNPs, wherein the LNPs comprise an RNA-guided nuclease or a nucleic acid encoding an RNA-guided nuclease and at least one guide RNA or a nucleic acid encoding at least one guide RNA targeting an CALCB gene, and an LNP system selected from any one of LNP001 to LNP240. In some embodiments, the at least one guide RNA has a crRNA sequence selected from SEQ ID NOs: 302-318. In some embodiments, the LNP system comprises the steroid component in a molar ratio from about 36 to about 46, or from about 38 to about 42. In some embodiments, the LNP system comprises the steroid component in a molar ratio of about 37, about 38, about 39, about 40, about 41, or about 42. In some embodiments, the steroid component comprises cholesterol. In some embodiments, the steroid component comprises cholesterol and one or more additional steroids, wherein cholesterol is about 60% (w/w) or more, about 65% (w/w) or more, about 70% (w/w) or more, about 75% (w/w) or more, or about 80% (w/w) or more of the steroid component. In some embodiments, the steroid component comprises dexamethasone. In some embodiments, the steroid component comprises a modified cholesterol, e.g., a hydroxy- or alkyl modification. In some embodiments, the steroid component comprises any other steroid disclosed herein. In some embodiments, the LNP system comprises the PEGylated Lipid Component in a molar ratio from about 1.5 to about 2.5. In some embodiments, the PEGylated Lipid Component comprises a PEG2000 lipid. In some embodiments, the PEGylated Lipid Component comprises one or more of DMG-PEG and/or DMG-C-PEG. In some embodiments, the PEGylated Lipid Component comprises one or more of DMG-PEG2000, DMG-C-PEG2000, DSG-PEG2000, C14-PEG2000, C16-PEG2000, and/or C18-PEG2000. In some embodiments, the plurality of LNPs have an average diameter between about 60 nm and about 120 nm. In some embodiments, the concentration of LNPs in the pharmaceutical composition is between 0.001 and 3 mg/ml. In some embodiments, the pharmaceutical composition targeting an CALCB gene is formulated for treating one or more disorders selected from (i) a joint disease or illness (e.g., arthritis, post-traumatic arthritis, osteoarthritis, rheumatoid arthritis, psoriatic arthritis, lupus, ankylosing spondylitis, reactive arthritis, septic arthritis, juvenile idiopathic arthritis, fibromyalgia, crystal arthropathies, gout, pseudogout, or CPPD disease/chondrocalcinosis), (ii) a spinal condition or disorder (e.g. discogenic disease, low back pain, neck pain, lumbar pain, degenerative disc disease, annual ligament tear, herniated disc, spinal facet joint arthritis, intervertebral disc disease, spondylosis, painful scoliosis, or spinal stenosis), (iii) a musculoskeletal disorder (e.g. fibrosis, scarring, infectious intermittent joint effusion, spondylarthritis, plantar fasciitis, degenerative polyarthritis, hemophilic arthropathy, inflammatory myopathy with abundant macrophages, or polymyositis), and/or any combinations thereof.

### U. CALCRL

[0693] In some embodiments, the disclosure provides one or more pharmaceutical compositions targeting an CALCRL gene, the composition comprising a plurality of LNPs, wherein the LNPs comprise an RNA-guided nuclease or a nucleic acid encoding an RNA-guided nuclease and at least one guide RNA or a nucleic acid encoding at least one guide RNA targeting an CALCRL gene, and an LNP system selected from any one of LNP001 to LNP240. In some embodiments, the at least one guide RNA has a crRNA sequence selected from SEQ ID NOs: 319-340. In some embodiments, the LNP system comprises the steroid component in a molar ratio from about 36 to about 46, or from about 38 to about 42. In some embodiments, the LNP system comprises the steroid component in a molar ratio of about 37, about 38, about 39, about 40, about 41, or about 42. In some embodiments, the steroid component comprises cholesterol. In some embodiments, the steroid component comprises cholesterol and one or more additional steroids, wherein cholesterol is about 60% (w/w) or more, about 65% (w/w) or more, about 70% (w/w) or more, about 75% (w/w) or more, or about 80% (w/w) or more of the steroid component. In some embodiments, the steroid component comprises dexamethasone. In some embodiments, the steroid component comprises a modified cholesterol, e.g., a hydroxy- or alkyl modification. In some embodiments, the steroid component comprises any other steroid disclosed herein. In some embodiments, the LNP system comprises the PEGylated Lipid Component in a molar ratio from about 1.5 to about 2.5. In some embodiments, the PEGylated Lipid Component comprises a PEG2000 lipid. In some embodiments, the PEGylated Lipid Component comprises one or more of DMG-PEG and/or DMG-C-PEG. In some embodiments, the PEGylated Lipid Component comprises one or more of DMG-PEG2000, DMG-C-PEG2000, DSG-PEG2000, C14-PEG2000, C16-PEG2000, and/or C18-PEG2000. In some embodiments, the plurality of LNPs have an average diameter between about 60 nm and about 120 nm. In some embodiments, the concentration of LNPs in the pharmaceutical composition is between 0.001 and 3 mg/ml. In some embodiments, the pharmaceutical composition targeting an CALCRL gene is formulated for treating one or more disorders selected from (i) a joint disease or illness (e.g., arthritis, post-traumatic arthritis, osteoarthritis, rheumatoid arthritis, psoriatic arthritis, lupus, ankylosing spondylitis, reactive arthritis, septic arthritis, juvenile idiopathic arthritis, fibromyalgia, crystal arthropathies, gout, pseudogout, or CPPD disease/chondrocalcinosis), (ii) a spinal condition or disorder (e.g. discogenic disease, low back pain, neck pain, lumbar pain, degenerative disc disease, annual ligament tear, herniated disc, spinal facet joint arthritis, intervertebral disc disease, spondylosis, painful scoliosis, or spinal stenosis), (iii) a musculoskeletal disorder (e.g. fibrosis, scarring, infectious intermittent joint effusion, spondylarthritis, plantar fasciitis, degenerative polyarthritis, hemophilic arthropathy, inflammatory myopathy with abundant macrophages, or polymyositis), and/or any combinations thereof.

### V. CCL2

[0694] In some embodiments, the disclosure provides one or more pharmaceutical compositions targeting an CCL2 gene, the composition comprising a plurality of LNPs, wherein the LNPs comprise an RNA-guided nuclease or a nucleic acid encoding an RNA-guided nuclease and at least one guide RNA or a nucleic acid encoding at least one guide RNA targeting an CCL2 gene, and an LNP system selected from any one of LNP001 to LNP240. In some embodiments, the at least one guide RNA has a crRNA sequence selected from SEQ ID NOs: 341-357. In some embodiments, the LNP system comprises the steroid component in a molar ratio from about 36 to about 46, or from about 38 to about 42. In some embodiments, the LNP system comprises the steroid component in a molar ratio of about 37, about 38, about 39, about 40, about 41, or about 42. In some embodiments, the steroid component comprises cholesterol. In some embodiments, the steroid component comprises cholesterol and one or more additional steroids, wherein cholesterol is about 60% (w/w) or more, about 65% (w/w) or more, about 70% (w/w) or more, about 75% (w/w) or more, or about 80% (w/w) or more of the steroid component. In some embodiments, the steroid component comprises dexamethasone. In some embodiments, the steroid component comprises a modified cholesterol, e.g., a hydroxy- or alkyl modification. In some embodiments, the steroid component comprises any other steroid disclosed herein. In some embodiments, the LNP system comprises the PEGylated Lipid Component in a molar ratio from about 1.5 to about 2.5. In some embodiments, the PEGylated Lipid Component comprises a PEG2000 lipid. In some embodiments, the PEGylated Lipid Component comprises one or more of DMG-PEG and/or DMG-C-PEG. In some embodiments, the PEGylated Lipid Component comprises one or more of DMG-PEG2000, DMG-C-PEG2000, DSG-PEG2000, C14-PEG2000, C16-PEG2000, and/or C18-PEG2000. In some embodiments, the plurality of LNPs have an average diameter between about 60 nm and about 120 nm. In some embodiments, the concentration of LNPs in the pharmaceutical composition is between 0.001 and 3 mg/ml. In some embodiments, the pharmaceutical composition targeting an CCL2 gene is formulated for treating one or more disorders selected from (i) a joint disease or illness (e.g., arthritis, post-traumatic arthritis, osteoarthritis, rheumatoid arthritis, psoriatic arthritis, lupus, ankylosing spondylitis, reactive arthritis, septic arthritis, juvenile idiopathic arthritis, fibromyalgia, crystal arthropathies, gout, pseudogout, or CPPD disease/chondrocalcinosis), (ii) a spinal condition or disorder (e.g. discogenic disease, low back pain, neck pain, lumbar pain, degenerative disc disease, annual ligament tear, herniated disc, spinal facet joint arthritis, intervertebral disc disease, spondylosis, painful scoliosis, or spinal stenosis), (iii) a musculoskeletal disorder (e.g. fibrosis, scarring, infectious intermittent joint effusion, spondylarthritis, plantar fasciitis, degenerative polyarthritis, hemophilic arthropathy, inflammatory myopathy with abundant macrophages, or polymyositis), and/or any combinations thereof.

### W. CCL3

[0695] In some embodiments, the disclosure provides one or more pharmaceutical compositions targeting an CCL3 gene, the composition comprising a plurality of LNPs, wherein the LNPs comprise an RNA-guided nuclease or a nucleic acid encoding an RNA-guided nuclease and at least one guide RNA or a nucleic acid encoding at least one guide RNA targeting an CCL3 gene, and an LNP system selected from any one of LNP001 to LNP240. In some embodiments, the at least one guide RNA has a crRNA sequence selected from SEQ ID NOs: 358-374. In some embodiments, the LNP system comprises the steroid component in a molar ratio from about 36 to about 46, or from about 38 to about 42. In some embodiments, the LNP system comprises the steroid component in a molar ratio of about 37, about 38, about 39, about 40, about 41, or about 42. In some embodiments, the steroid component comprises cholesterol. In some embodiments, the steroid component comprises cholesterol and one or more additional steroids, wherein cholesterol is about 60% (w/w) or more, about 65% (w/w) or more, about 70% (w/w) or more, about 75% (w/w) or more, or about 80% (w/w) or more of the steroid component. In some embodiments, the steroid component comprises dexamethasone. In some embodiments, the steroid component comprises a modified cholesterol, e.g., a hydroxy- or alkyl modification. In some embodiments, the steroid component comprises any other steroid disclosed herein. In some embodiments, the LNP system comprises the PEGylated Lipid Component in a molar ratio from about 1.5 to about 2.5. In some embodiments, the PEGylated Lipid Component comprises a PEG2000 lipid. In some embodiments, the PEGylated Lipid Component comprises one or more of DMG-PEG and/or DMG-C-PEG. In some embodiments, the PEGylated Lipid Component comprises one or more of DMG-PEG2000, DMG-C-PEG2000, DSG-PEG2000, C14-PEG2000, C16-PEG2000, and/or C18-PEG2000. In some embodiments, the plurality of LNPs have an average diameter between about 60 nm and about 120 nm. In some embodiments, the concentration of LNPs in the pharmaceutical composition is between 0.001 and 3 mg/ml. In some embodiments, the pharmaceutical composition targeting an CCL3 gene is formulated for treating one or more disorders selected from (i) a joint disease or illness (e.g., arthritis, post-traumatic arthritis, osteoarthritis, rheumatoid arthritis, psoriatic arthritis, lupus, ankylosing spondylitis, reactive arthritis, septic arthritis, juvenile idiopathic arthritis, fibromyalgia, crystal arthropathies, gout, pseudogout, or CPPD disease/chondrocalcinosis), (ii) a spinal condition or disorder (e.g. discogenic disease, low back pain, neck pain, lumbar pain, degenerative disc disease, annual ligament tear, herniated disc, spinal facet joint arthritis, intervertebral disc disease, spondylosis, painful scoliosis, or spinal stenosis), (iii) a musculoskeletal disorder (e.g. fibrosis, scarring, infectious intermittent joint effusion, spondylarthritis, plantar fasciitis, degenerative polyarthritis, hemophilic arthropathy, inflammatory myopathy with abundant macrophages, or polymyositis), and/or any combinations thereof.

### X. CCL5

[0696] In some embodiments, the disclosure provides one or more pharmaceutical compositions targeting an CCL5 gene, the composition comprising a plurality of LNPs, wherein the LNPs comprise an RNA-guided nuclease or a nucleic acid encoding an RNA-guided nuclease and at least one guide RNA or a nucleic acid encoding at least one guide RNA targeting an CCL5 gene, and an LNP system selected from any one of LNP001 to LNP240. In some embodiments, the at least one guide RNA has a crRNA sequence selected from SEQ ID NOs: 375-391. In some embodiments, the LNP system comprises the steroid component in a molar ratio from about 36 to about 46, or from about 38 to about 42. In some embodiments, the LNP system comprises the steroid component in a molar ratio of about 37, about 38, about 39, about 40, about 41, or about 42. In some embodiments, the steroid component comprises cholesterol. In some embodiments, the steroid component comprises cholesterol and one or more additional steroids, wherein cholesterol is about 60% (w/w) or more, about 65% (w/w) or more, about 70% (w/w) or more, about 75% (w/w) or more, or about 80% (w/w) or more of the steroid component. In some embodiments, the steroid component comprises dexamethasone. In some embodiments, the steroid component comprises a modified cholesterol, e.g., a hydroxy- or alkyl modification. In some embodiments, the steroid component comprises any other steroid disclosed herein. In some embodiments, the LNP system comprises the PEGylated Lipid Component in a molar ratio from about 1.5 to about 2.5. In some embodiments, the PEGylated Lipid Component comprises a PEG2000 lipid. In some embodiments, the PEGylated Lipid Component comprises one or more of DMG-PEG and/or DMG-C-PEG. In some embodiments, the PEGylated Lipid Component comprises one or more of DMG-PEG2000, DMG-C-PEG2000, DSG-PEG2000, C14-PEG2000, C16-PEG2000, and/or C18-PEG2000. In some embodiments, the plurality of LNPs have an average diameter between about 60 nm and about 120 nm. In some embodiments, the concentration of LNPs in the pharmaceutical composition is between 0.001 and 3 mg/ml. In some embodiments, the pharmaceutical composition targeting an CCL5 gene is formulated for treating one or more disorders selected from (i) a joint disease or illness (e.g., arthritis, post-traumatic arthritis, osteoarthritis, rheumatoid arthritis, psoriatic arthritis, lupus, ankylosing spondylitis, reactive arthritis, septic arthritis, juvenile idiopathic arthritis, fibromyalgia, crystal arthropathies, gout, pseudogout, or CPPD disease/chondrocalcinosis), (ii) a spinal condition or disorder (e.g. discogenic disease, low back pain, neck pain, lumbar pain, degenerative disc disease, annual ligament tear, herniated disc, spinal facet joint arthritis, intervertebral disc disease, spondylosis, painful scoliosis, or spinal stenosis), (iii) a musculoskeletal disorder (e.g. fibrosis, scarring, infectious intermittent joint effusion, spondylarthritis, plantar fasciitis, degenerative polyarthritis, hemophilic arthropathy, inflammatory myopathy with abundant macrophages, or polymyositis), and/or any combinations thereof.

### Y. CCL7

[0697] In some embodiments, the disclosure provides one or more pharmaceutical compositions targeting an CCL7 gene, the composition comprising a plurality of LNPs, wherein the LNPs comprise an RNA-guided nuclease or a nucleic acid encoding an RNA-guided nuclease and at least one guide RNA or a nucleic acid encoding at least one guide RNA targeting an CCL7 gene, and an LNP system selected from any one of LNP001 to LNP240. In some embodiments, the at least one guide RNA has a crRNA sequence selected from SEQ ID NOs: 392-408. In some embodiments, the LNP system comprises the steroid component in a molar ratio from about 36 to about 46, or from about 38 to about 42. In some embodiments, the LNP system comprises the steroid component in a molar ratio of about 37, about 38, about 39, about 40, about 41, or about 42. In some embodiments, the steroid component comprises cholesterol. In some embodiments, the steroid component comprises cholesterol and one or more additional steroids, wherein cholesterol is about 60% (w/w) or more, about 65% (w/w) or more, about 70% (w/w) or more, about 75% (w/w) or more, or about 80% (w/w) or more of the steroid component. In some embodiments, the steroid component comprises dexamethasone. In some embodiments, the steroid component comprises a modified cholesterol, e.g., a hydroxy- or alkyl modification. In some embodiments, the steroid component comprises any other steroid disclosed herein. In some embodiments, the LNP system comprises the PEGylated Lipid Component in a molar ratio from about 1.5 to about 2.5. In some embodiments, the PEGylated Lipid Component comprises a PEG2000 lipid. In some embodiments, the PEGylated Lipid Component comprises one or more of DMG-PEG and/or DMG-C-PEG. In some embodiments, the PEGylated Lipid Component comprises one or more of DMG-PEG2000, DMG-C-PEG2000, DSG-PEG2000, C14-PEG2000, C16-PEG2000, and/or C18-PEG2000. In some embodiments, the plurality of LNPs have an average diameter between about 60 nm and about 120 nm. In some embodiments, the concentration of LNPs in the pharmaceutical composition is between 0.001 and 3 mg/ml. In some embodiments, the pharmaceutical composition targeting an CCL7 gene is formulated for treating one or more disorders selected from (i) a joint disease or illness (e.g., arthritis, post-traumatic arthritis, osteoarthritis, rheumatoid arthritis, psoriatic arthritis, lupus, ankylosing spondylitis, reactive arthritis, septic arthritis, juvenile idiopathic arthritis, fibromyalgia, crystal arthropathies, gout, pseudogout, or CPPD disease/chondrocalcinosis), (ii) a spinal condition or disorder (e.g. discogenic disease, low back pain, neck pain, lumbar pain, degenerative disc disease, annual ligament tear, herniated disc, spinal facet joint arthritis, intervertebral disc disease, spondylosis, painful scoliosis, or spinal stenosis), (iii) a musculoskeletal disorder (e.g. fibrosis, scarring, infectious intermittent joint effusion, spondylarthritis, plantar fasciitis, degenerative polyarthritis, hemophilic arthropathy, inflammatory myopathy with abundant macrophages, or polymyositis), and/or any combinations thereof.

### Z. CCL20

[0698] In some embodiments, the disclosure provides one or more pharmaceutical compositions targeting an CCL20 gene, the composition comprising a plurality of LNPs, wherein the LNPs comprise an RNA-guided nuclease or a nucleic acid encoding an RNA-guided nuclease and at least one guide RNA or a nucleic acid encoding at least one guide RNA targeting an CCL20 gene, and an LNP system selected from any one of LNP001 to LNP240. In some embodiments, the at least one guide RNA has a crRNA sequence selected from SEQ ID NOs: 409-425. In some embodiments, the LNP system comprises the steroid component in a molar ratio from about 36 to about 46, or from about 38 to about 42. In some embodiments, the LNP system comprises the steroid component in a molar ratio of about 37, about 38, about 39, about 40, about 41, or about 42. In some embodiments, the steroid component comprises cholesterol. In some embodiments, the steroid component comprises cholesterol and one or more additional steroids, wherein cholesterol is about 60% (w/w) or more, about 65% (w/w) or more, about 70% (w/w) or more, about 75% (w/w) or more, or about 80% (w/w) or more of the steroid component. In some embodiments, the steroid component comprises dexamethasone. In some embodiments, the steroid component comprises a modified cholesterol, e.g., a hydroxy- or alkyl modification. In some embodiments, the steroid component comprises any other steroid disclosed herein. In some embodiments, the LNP system comprises the PEGylated Lipid Component in a molar ratio from about 1.5 to about 2.5. In some embodiments, the PEGylated Lipid Component comprises a PEG2000 lipid. In some embodiments, the PEGylated Lipid Component comprises one or more of DMG-PEG and/or DMG-C-PEG. In some embodiments, the PEGylated Lipid Component comprises one or more of DMG-PEG2000, DMG-C-PEG2000, DSG-PEG2000, C14-PEG2000, C16-PEG2000, and/or C18-PEG2000. In some embodiments, the plurality of LNPs have an average diameter between about 60 nm and about 120 nm. In some embodiments, the concentration of LNPs in the pharmaceutical composition is between 0.001 and 3 mg/ml. In some embodiments, the pharmaceutical composition targeting an CCL20 gene is formulated for treating one or more disorders selected from (i) a joint disease or illness (e.g., arthritis, post-traumatic arthritis, osteoarthritis, rheumatoid arthritis, psoriatic arthritis, lupus, ankylosing spondylitis, reactive arthritis, septic arthritis, juvenile idiopathic arthritis, fibromyalgia, crystal arthropathies, gout, pseudogout, or CPPD disease/chondrocalcinosis), (ii) a spinal condition or disorder (e.g. discogenic disease, low back pain, neck pain, lumbar pain, degenerative disc disease, annual ligament tear, herniated disc, spinal facet joint arthritis, intervertebral disc disease, spondylosis, painful scoliosis, or spinal stenosis), (iii) a musculoskeletal disorder (e.g. fibrosis, scarring, infectious intermittent joint effusion, spondylarthritis, plantar fasciitis, degenerative polyarthritis, hemophilic arthropathy, inflammatory myopathy with abundant macrophages, or polymyositis), and/or any combinations thereof.

### AA. CCN2

[0699] In some embodiments, the disclosure provides one or more pharmaceutical compositions targeting an CCN2 gene, the composition comprising a plurality of LNPs, wherein the LNPs comprise an RNA-guided nuclease or a nucleic acid encoding an RNA-guided nuclease and at least one guide RNA or a nucleic acid encoding at least one guide RNA targeting an CCN2 gene, and an LNP system selected from any one of LNP001 to LNP240. In some embodiments, the at least one guide RNA has a crRNA sequence selected from SEQ ID NOs: 426-473. In some embodiments, the LNP system comprises the steroid component in a molar ratio from about 36 to about 46, or from about 38 to about 42. In some embodiments, the LNP system comprises the steroid component in a molar ratio of about 37, about 38, about 39, about 40, about 41, or about 42. In some embodiments, the steroid component comprises cholesterol. In some embodiments, the steroid component comprises cholesterol and one or more additional steroids, wherein cholesterol is about 60% (w/w) or more, about 65% (w/w) or more, about 70% (w/w) or more, about 75% (w/w) or more, or about 80% (w/w) or more of the steroid component. In some embodiments, the steroid component comprises dexamethasone. In some embodiments, the steroid component comprises a modified cholesterol, e.g., a hydroxy- or alkyl modification. In some embodiments, the steroid component comprises any other steroid disclosed herein. In some embodiments, the LNP system comprises the PEGylated Lipid Component in a molar ratio from about 1.5 to about 2.5. In some embodiments, the PEGylated Lipid Component comprises a PEG2000 lipid. In some embodiments, the PEGylated Lipid Component comprises one or more of DMG-PEG and/or DMG-C-PEG. In some embodiments, the PEGylated Lipid Component comprises one or more of DMG-PEG2000, DMG-C-PEG2000, DSG-PEG2000, C14-PEG2000, C16-PEG2000, and/or C18-PEG2000. In some embodiments, the plurality of LNPs have an average diameter between about 60 nm and about 120 nm. In some embodiments, the concentration of LNPs in the pharmaceutical composition is between 0.001 and 3 mg/ml. In some embodiments, the pharmaceutical composition targeting an CCN2 gene is formulated for treating one or more disorders selected from (i) a joint disease or illness (e.g., arthritis, post-traumatic arthritis, osteoarthritis, rheumatoid arthritis, psoriatic arthritis, lupus, ankylosing spondylitis, reactive arthritis, septic arthritis, juvenile idiopathic arthritis, fibromyalgia, crystal arthropathies, gout, pseudogout, or CPPD disease/chondrocalcinosis), (ii) a spinal condition or disorder (e.g. discogenic disease, low back pain, neck pain, lumbar pain, degenerative disc disease, annual ligament tear, herniated disc, spinal facet joint arthritis, intervertebral disc disease, spondylosis, painful scoliosis, or spinal stenosis), (iii) a musculoskeletal disorder (e.g. fibrosis, scarring, infectious intermittent joint effusion, spondylarthritis, plantar fasciitis, degenerative polyarthritis, hemophilic arthropathy, inflammatory myopathy with abundant macrophages, or polymyositis), and/or any combinations thereof.

### BB. CCR7

[0700] In some embodiments, the disclosure provides one or more pharmaceutical compositions targeting an CCR7 gene, the composition comprising a plurality of LNPs, wherein the LNPs comprise an RNA-guided nuclease or a nucleic acid encoding an RNA-guided nuclease and at least one guide RNA or a nucleic acid encoding at least one guide RNA targeting an CCR7 gene, and an LNP system selected from any one of LNP001 to LNP240. In some embodiments, the at least one guide RNA has a crRNA sequence selected from SEQ ID NOs: 474-517. In some embodiments, the LNP system comprises the steroid component in a molar ratio from about 36 to about 46, or from about 38 to about 42. In some embodiments, the LNP system comprises the steroid component in a molar ratio of about 37, about 38, about 39, about 40, about 41, or about 42. In some embodiments, the steroid component comprises cholesterol. In some embodiments, the steroid component comprises cholesterol and one or more additional steroids, wherein cholesterol is about 60% (w/w) or more, about 65% (w/w) or more, about 70% (w/w) or more, about 75% (w/w) or more, or about 80% (w/w) or more of the steroid component. In some embodiments, the steroid component comprises dexamethasone. In some embodiments, the steroid component comprises a modified cholesterol, e.g., a hydroxy- or alkyl modification. In some embodiments, the steroid component comprises any other steroid disclosed herein. In some embodiments, the LNP system comprises the PEGylated Lipid Component in a molar ratio from about 1.5 to about 2.5. In some embodiments, the PEGylated Lipid Component comprises a PEG2000 lipid. In some embodiments, the PEGylated Lipid Component comprises one or more of DMG-PEG and/or DMG-C-PEG. In some embodiments, the PEGylated Lipid Component comprises one or more of DMG-PEG2000, DMG-C-PEG2000, DSG-PEG2000, C14-PEG2000, C16-PEG2000, and/or C18-PEG2000. In some embodiments, the plurality of LNPs have an average diameter between about 60 nm and about 120 nm. In some embodiments, the concentration of LNPs in the pharmaceutical composition is between 0.001 and 3 mg/ml. In some embodiments, the pharmaceutical composition targeting an CCR7 gene is formulated for treating one or more disorders selected from (i) a joint disease or illness (e.g., arthritis, post-traumatic arthritis, osteoarthritis, rheumatoid arthritis, psoriatic arthritis, lupus, ankylosing spondylitis, reactive arthritis, septic arthritis, juvenile idiopathic arthritis, fibromyalgia, crystal arthropathies, gout, pseudogout, or CPPD disease/chondrocalcinosis), (ii) a spinal condition or disorder (e.g. discogenic disease, low back pain, neck pain, lumbar pain, degenerative disc disease, annual ligament tear, herniated disc, spinal facet joint arthritis, intervertebral disc disease, spondylosis, painful scoliosis, or spinal stenosis), (iii) a musculoskeletal disorder (e.g. fibrosis, scarring, infectious intermittent joint effusion, spondylarthritis, plantar fasciitis, degenerative polyarthritis, hemophilic arthropathy, inflammatory myopathy with abundant macrophages, or polymyositis), and/or any combinations thereof.

### CC. CRCP

[0701] In some embodiments, the disclosure provides one or more pharmaceutical compositions targeting an CRCP gene, the composition comprising a plurality of LNPs, wherein the LNPs comprise an RNA-guided nuclease or a nucleic acid encoding an RNA-guided nuclease and at least one guide RNA or a nucleic acid encoding at least one guide RNA targeting an CRCP gene, and an LNP system selected from any one of LNP001 to LNP240. In some embodiments, the at least one guide RNA has a crRNA sequence selected from SEQ ID NOs: 518-534. In some embodiments, the LNP system comprises the steroid component in a molar ratio from about 36 to about 46, or from about 38 to about 42. In some embodiments, the LNP system comprises the steroid component in a molar ratio of about 37, about 38, about 39, about 40, about 41, or about 42. In some embodiments, the steroid component comprises cholesterol. In some embodiments, the steroid component comprises cholesterol and one or more additional steroids, wherein cholesterol is about 60% (w/w) or more, about 65% (w/w) or more, about 70% (w/w) or more, about 75% (w/w) or more, or about 80% (w/w) or more of the steroid component. In some embodiments, the steroid component comprises dexamethasone. In some embodiments, the steroid component comprises a modified cholesterol, e.g., a hydroxy- or alkyl modification. In some embodiments, the steroid component comprises any other steroid disclosed herein. In some embodiments, the LNP system comprises the PEGylated Lipid Component in a molar ratio from about 1.5 to about 2.5. In some embodiments, the PEGylated Lipid Component comprises a PEG2000 lipid. In some embodiments, the PEGylated Lipid Component comprises one or more of DMG-PEG and/or DMG-C-PEG. In some embodiments, the PEGylated Lipid Component comprises one or more of DMG-PEG2000, DMG-C-PEG2000, DSG-PEG2000, C14-PEG2000, C16-PEG2000, and/or C18-PEG2000. In some embodiments, the plurality of LNPs have an average diameter between about 60 nm and about 120 nm. In some embodiments, the concentration of LNPs in the pharmaceutical composition is between 0.001 and 3 mg/ml. In some embodiments, the pharmaceutical composition targeting an CRCP gene is formulated for treating one or more disorders selected from (i) a joint disease or illness (e.g., arthritis, post-traumatic arthritis, osteoarthritis, rheumatoid arthritis, psoriatic arthritis, lupus, ankylosing spondylitis, reactive arthritis, septic arthritis, juvenile idiopathic arthritis, fibromyalgia, crystal arthropathies, gout, pseudogout, or CPPD disease/chondrocalcinosis), (ii) a spinal condition or disorder (e.g. discogenic disease, low back pain, neck pain, lumbar pain, degenerative disc disease, annual ligament tear, herniated disc, spinal facet joint arthritis, intervertebral disc disease, spondylosis, painful scoliosis, or spinal stenosis), (iii) a musculoskeletal disorder (e.g. fibrosis, scarring, infectious intermittent joint effusion, spondylarthritis, plantar fasciitis, degenerative polyarthritis, hemophilic arthropathy, inflammatory myopathy with abundant macrophages, or polymyositis), and/or any combinations thereof.

### DD. CXCL1

[0702] In some embodiments, the disclosure provides one or more pharmaceutical compositions targeting an CXCL1 gene, the composition comprising a plurality of LNPs, wherein the LNPs comprise an RNA-guided nuclease or a nucleic acid encoding an RNA-guided nuclease and at least one guide RNA or a nucleic acid encoding at least one guide RNA targeting an CXCL1 gene, and an LNP system selected from any one of LNP001 to LNP240. In some embodiments, the at least one guide RNA has a crRNA sequence selected from SEQ ID NOs: 535-551. In some embodiments, the LNP system comprises the steroid component in a molar ratio from about 36 to about 46, or from about 38 to about 42. In some embodiments, the LNP system comprises the steroid component in a molar ratio of about 37, about 38, about 39, about 40, about 41, or about 42. In some embodiments, the steroid component comprises cholesterol. In some embodiments, the steroid component comprises cholesterol and one or more additional steroids, wherein cholesterol is about 60% (w/w) or more, about 65% (w/w) or more, about 70% (w/w) or more, about 75% (w/w) or more, or about 80% (w/w) or more of the steroid component. In some embodiments, the steroid component comprises dexamethasone. In some embodiments, the steroid component comprises a modified cholesterol, e.g., a hydroxy- or alkyl modification. In some embodiments, the steroid component comprises any other steroid disclosed herein. In some embodiments, the LNP system comprises the PEGylated Lipid Component in a molar ratio from about 1.5 to about 2.5. In some embodiments, the PEGylated Lipid Component comprises a PEG2000 lipid. In some embodiments, the PEGylated Lipid Component comprises one or more of DMG-PEG and/or DMG-C-PEG. In some embodiments, the PEGylated Lipid Component comprises one or more of DMG-PEG2000, DMG-C-PEG2000, DSG-PEG2000, C14-PEG2000, C16-PEG2000, and/or C18-PEG2000. In some embodiments, the plurality of LNPs have an average diameter between about 60 nm and about 120 nm. In some embodiments, the concentration of LNPs in the pharmaceutical composition is between 0.001 and 3 mg/ml. In some embodiments, the pharmaceutical composition targeting an CXCL1 gene is formulated for treating one or more disorders selected from (i) a joint disease or illness (e.g., arthritis, post-traumatic arthritis, osteoarthritis, rheumatoid arthritis, psoriatic arthritis, lupus, ankylosing spondylitis, reactive arthritis, septic arthritis, juvenile idiopathic arthritis, fibromyalgia, crystal arthropathies, gout, pseudogout, or CPPD disease/chondrocalcinosis), (ii) a spinal condition or disorder (e.g. discogenic disease, low back pain, neck pain, lumbar pain, degenerative disc disease, annual ligament tear, herniated disc, spinal facet joint arthritis, intervertebral disc disease, spondylosis, painful scoliosis, or spinal stenosis), (iii) a musculoskeletal disorder (e.g. fibrosis, scarring, infectious intermittent joint effusion, spondylarthritis, plantar fasciitis, degenerative polyarthritis, hemophilic arthropathy, inflammatory myopathy with abundant macrophages, or polymyositis), and/or any combinations thereof.

### EE. CXCL2

[0703] In some embodiments, the disclosure provides one or more pharmaceutical compositions targeting an CXCL2 gene, the composition comprising a plurality of LNPs, wherein the LNPs comprise an RNA-guided nuclease or a nucleic acid encoding an RNA-guided nuclease and at least one guide RNA or a nucleic acid encoding at least one guide RNA targeting an CXCL2 gene, and an LNP system selected from any one of LNP001 to LNP240. In some embodiments, the at least one guide RNA has a crRNA sequence selected from SEQ ID NOs: 552-568. In some embodiments, the LNP system comprises the steroid component in a molar ratio from about 36 to about 46, or from about 38 to about 42. In some embodiments, the LNP system comprises the steroid component in a molar ratio of about 37, about 38, about 39, about 40, about 41, or about 42. In some embodiments, the steroid component comprises cholesterol. In some embodiments, the steroid component comprises cholesterol and one or more additional steroids, wherein cholesterol is about 60% (w/w) or more, about 65% (w/w) or more, about 70% (w/w) or more, about 75% (w/w) or more, or about 80% (w/w) or more of the steroid component. In some embodiments, the steroid component comprises dexamethasone. In some embodiments, the steroid component comprises a modified cholesterol, e.g., a hydroxy- or alkyl modification. In some embodiments, the steroid component comprises any other steroid disclosed herein. In some embodiments, the LNP system comprises the PEGylated Lipid Component in a molar ratio from about 1.5 to about 2.5. In some embodiments, the PEGylated Lipid Component comprises a PEG2000 lipid. In some embodiments, the PEGylated Lipid Component comprises one or more of DMG-PEG and/or DMG-C-PEG. In some embodiments, the PEGylated Lipid Component comprises one or more of DMG-PEG2000, DMG-C-PEG2000, DSG-PEG2000, C14-PEG2000, C16-PEG2000, and/or C18-PEG2000. In some embodiments, the plurality of LNPs have an average diameter between about 60 nm and about 120 nm. In some embodiments, the concentration of LNPs in the pharmaceutical composition is between 0.001 and 3 mg/ml. In some embodiments, the pharmaceutical composition targeting an CXCL2 gene is formulated for treating one or more disorders selected from (i) a joint disease or illness (e.g., arthritis, post-traumatic arthritis, osteoarthritis, rheumatoid arthritis, psoriatic arthritis, lupus, ankylosing spondylitis, reactive arthritis, septic arthritis, juvenile idiopathic arthritis, fibromyalgia, crystal arthropathies, gout, pseudogout, or CPPD disease/chondrocalcinosis), (ii) a spinal condition or disorder (e.g. discogenic disease, low back pain, neck pain, lumbar pain, degenerative disc disease, annual ligament tear, herniated disc, spinal facet joint arthritis, intervertebral disc disease, spondylosis, painful scoliosis, or spinal stenosis), (iii) a musculoskeletal disorder (e.g. fibrosis, scarring, infectious intermittent joint effusion, spondylarthritis, plantar fasciitis, degenerative polyarthritis, hemophilic arthropathy, inflammatory myopathy with abundant macrophages, or polymyositis), and/or any combinations thereof.

### FF. CXCL3

[0704] In some embodiments, the disclosure provides one or more pharmaceutical compositions targeting an CXCL3 gene, the composition comprising a plurality of LNPs, wherein the LNPs comprise an RNA-guided nuclease or a nucleic acid encoding an RNA-guided nuclease and at least one guide RNA or a nucleic acid encoding at least one guide RNA targeting an CXCL3 gene, and an LNP system selected from any one of LNP001 to LNP240. In some embodiments, the at least one guide RNA has a crRNA sequence selected from SEQ ID NOs: 569-585. In some embodiments, the LNP system comprises the steroid component in a molar ratio from about 36 to about 46, or from about 38 to about 42. In some embodiments, the LNP system comprises the steroid component in a molar ratio of about 37, about 38, about 39, about 40, about 41, or about 42. In some embodiments, the steroid component comprises cholesterol. In some embodiments, the steroid component comprises cholesterol and one or more additional steroids, wherein cholesterol is about 60% (w/w) or more, about 65% (w/w) or more, about 70% (w/w) or more, about 75% (w/w) or more, or about 80% (w/w) or more of the steroid component. In some embodiments, the steroid component comprises dexamethasone. In some embodiments, the steroid component comprises a modified cholesterol, e.g., a hydroxy- or alkyl modification. In some embodiments, the steroid component comprises any other steroid disclosed herein. In some embodiments, the LNP system comprises the PEGylated Lipid Component in a molar ratio from about 1.5 to about 2.5. In some embodiments, the PEGylated Lipid Component comprises a PEG2000 lipid. In some embodiments, the PEGylated Lipid Component comprises one or more of DMG-PEG and/or DMG-C-PEG. In some embodiments, the PEGylated Lipid Component comprises one or more of DMG-PEG2000, DMG-C-PEG2000, DSG-PEG2000, C14-PEG2000, C16-PEG2000, and/or C18-PEG2000. In some embodiments, the pharmaceutical composition targeting an CXCL3 gene is formulated for treating one or more disorders selected from (i) a joint disease or illness (e.g., arthritis, post-traumatic arthritis, osteoarthritis, rheumatoid arthritis, psoriatic arthritis, lupus, ankylosing spondylitis, reactive arthritis, septic arthritis, juvenile idiopathic arthritis, fibromyalgia, crystal arthropathies, gout, pseudogout, or CPPD disease/chondrocalcinosis), (ii) a spinal condition or disorder (e.g. discogenic disease, low back pain, neck pain, lumbar pain, degenerative disc disease, annual ligament tear, herniated disc, spinal facet joint arthritis, intervertebral disc disease, spondylosis, painful scoliosis, or spinal stenosis), (iii) a musculoskeletal disorder (e.g. fibrosis, scarring, infectious intermittent joint effusion, spondylarthritis, plantar fasciitis, degenerative polyarthritis, hemophilic arthropathy, inflammatory myopathy with abundant macrophages, or polymyositis), and/or any combinations thereof.

### GG. CXCL5

[0705] In some embodiments, the disclosure provides one or more pharmaceutical compositions targeting an CXCL5 gene, the composition comprising a plurality of LNPs, wherein the LNPs comprise an RNA-guided nuclease or a nucleic acid encoding an RNA-guided nuclease and at least one guide RNA or a nucleic acid encoding at least one guide RNA targeting an CXCL5 gene, and an LNP system selected from any one of LNP001 to LNP240. In some embodiments, the at least one guide RNA has a crRNA sequence selected from SEQ ID NOs: 586-602. In some embodiments, the LNP system comprises the steroid component in a molar ratio from about 36 to about 46, or from about 38 to about 42. In some embodiments, the LNP system comprises the steroid component in a molar ratio of about 37, about 38, about 39, about 40, about 41, or about 42. In some embodiments, the steroid component comprises cholesterol. In some embodiments, the steroid component comprises cholesterol and one or more additional steroids, wherein cholesterol is about 60% (w/w) or more, about 65% (w/w) or more, about 70% (w/w) or more, about 75% (w/w) or more, or about 80% (w/w) or more of the steroid component. In some embodiments, the steroid component comprises dexamethasone. In some embodiments, the steroid component comprises a modified cholesterol, e.g., a hydroxy- or alkyl modification. In some embodiments, the steroid component comprises any other steroid disclosed herein. In some embodiments, the LNP system comprises the PEGylated Lipid Component in a molar ratio from about 1.5 to about 2.5. In some embodiments, the PEGylated Lipid Component comprises a PEG2000 lipid. In some embodiments, the PEGylated Lipid Component comprises one or more of DMG-PEG and/or DMG-C-PEG. In some embodiments, the PEGylated Lipid Component comprises one or more of DMG-PEG2000, DMG-C-PEG2000, DSG-PEG2000, C14-PEG2000, C16-PEG2000, and/or C18-PEG2000. In some embodiments, the plurality of LNPs have an average diameter between about 60 nm and about 120 nm. In some embodiments, the concentration of LNPs in the pharmaceutical composition is between 0.001 and 3 mg/ml. In some embodiments, the pharmaceutical composition targeting an CXCL5 gene is formulated for treating one or more disorders selected from (i) a joint disease or illness (e.g., arthritis, post-traumatic arthritis, osteoarthritis, rheumatoid arthritis, psoriatic arthritis, lupus, ankylosing spondylitis, reactive arthritis, septic arthritis, juvenile idiopathic arthritis, fibromyalgia, crystal arthropathies, gout, pseudogout, or CPPD disease/chondrocalcinosis), (ii) a spinal condition or disorder (e.g. discogenic disease, low back pain, neck pain, lumbar pain, degenerative disc disease, annual ligament tear, herniated disc, spinal facet joint arthritis, intervertebral disc disease, spondylosis, painful scoliosis, or spinal stenosis), (iii) a musculoskeletal disorder (e.g. fibrosis, scarring, infectious intermittent joint effusion, spondylarthritis, plantar fasciitis, degenerative polyarthritis, hemophilic arthropathy, inflammatory myopathy with abundant macrophages, or polymyositis), and/or any combinations thereof.

### HH. CXCL6

[0706] In some embodiments, the disclosure provides one or more pharmaceutical compositions targeting an CXCL6 gene, the composition comprising a plurality of LNPs, wherein the LNPs comprise an RNA-guided nuclease or a nucleic acid encoding an RNA-guided nuclease and at least one guide RNA or a nucleic acid encoding at least one guide RNA targeting an CXCL6 gene, and an LNP system selected from any one of LNP001 to LNP240. In some embodiments, the at least one guide RNA has a crRNA sequence selected from SEQ ID NOs: 603-619. In some embodiments, the LNP system comprises the steroid component in a molar ratio from about 36 to about 46, or from about 38 to about 42. In some embodiments, the LNP system comprises the steroid component in a molar ratio of about 37, about 38, about 39, about 40, about 41, or about 42. In some embodiments, the steroid component comprises cholesterol. In some embodiments, the steroid component comprises cholesterol and one or more additional steroids, wherein cholesterol is about 60% (w/w) or more, about 65% (w/w) or more, about 70% (w/w) or more, about 75% (w/w) or more, or about 80% (w/w) or more of the steroid component. In some embodiments, the steroid component comprises dexamethasone. In some embodiments, the steroid component comprises a modified cholesterol, e.g., a hydroxy- or alkyl modification. In some embodiments, the steroid component comprises any other steroid disclosed herein. In some embodiments, the LNP system comprises the PEGylated Lipid Component in a molar ratio from about 1.5 to about 2.5. In some embodiments, the PEGylated Lipid Component comprises a PEG2000 lipid. In some embodiments, the PEGylated Lipid Component comprises one or more of DMG-PEG and/or DMG-C-PEG. In some embodiments, the PEGylated Lipid Component comprises one or more of DMG-PEG2000, DMG-C-PEG2000, DSG-PEG2000, C14-PEG2000, C16-PEG2000, and/or C18-PEG2000. In some embodiments, the plurality of LNPs have an average diameter between about 60 nm and about 120 nm. In some embodiments, the concentration of LNPs in the pharmaceutical composition is between 0.001 and 3 mg/ml. In some embodiments, the pharmaceutical composition targeting an CXCL6 gene is formulated for treating one or more disorders selected from (i) a joint disease or illness (e.g., arthritis, post-traumatic arthritis, osteoarthritis, rheumatoid arthritis, psoriatic arthritis, lupus, ankylosing spondylitis, reactive arthritis, septic arthritis, juvenile idiopathic arthritis, fibromyalgia, crystal arthropathies, gout, pseudogout, or CPPD disease/chondrocalcinosis), (ii) a spinal condition or disorder (e.g. discogenic disease, low back pain, neck pain, lumbar pain, degenerative disc disease, annual ligament tear, herniated disc, spinal facet joint arthritis, intervertebral disc disease, spondylosis, painful scoliosis, or spinal stenosis), (iii) a musculoskeletal disorder (e.g. fibrosis, scarring, infectious intermittent joint effusion, spondylarthritis, plantar fasciitis, degenerative polyarthritis, hemophilic arthropathy, inflammatory myopathy with abundant macrophages, or polymyositis), and/or any combinations thereof.

### II. CXCL8

[0707] In some embodiments, the disclosure provides one or more pharmaceutical compositions targeting an CXCL8 gene, the composition comprising a plurality of LNPs, wherein the LNPs comprise an RNA-guided nuclease or a nucleic acid encoding an RNA-guided nuclease and at least one guide RNA or a nucleic acid encoding at least one guide RNA targeting an CXCL8 gene, and an LNP system selected from any one of LNP001 to LNP240. In some embodiments, the at least one guide RNA has a crRNA sequence selected from SEQ ID NOs: 620-636. In some embodiments, the LNP system comprises the steroid component in a molar ratio from about 36 to about 46, or from about 38 to about 42. In some embodiments, the LNP system comprises the steroid component in a molar ratio of about 37, about 38, about 39, about 40, about 41, or about 42. In some embodiments, the steroid component comprises cholesterol. In some embodiments, the steroid component comprises cholesterol and one or more additional steroids, wherein cholesterol is about 60% (w/w) or more, about 65% (w/w) or more, about 70% (w/w) or more, about 75% (w/w) or more, or about 80% (w/w) or more of the steroid component. In some embodiments, the steroid component comprises dexamethasone. In some embodiments, the steroid component comprises a modified cholesterol, e.g., a hydroxy- or alkyl modification. In some embodiments, the steroid component comprises any other steroid disclosed herein. In some embodiments, the LNP system comprises the PEGylated Lipid Component in a molar ratio from about 1.5 to about 2.5. In some embodiments, the PEGylated Lipid Component comprises a PEG2000 lipid. In some embodiments, the PEGylated Lipid Component comprises one or more of DMG-PEG and/or DMG-C-PEG. In some embodiments, the PEGylated Lipid Component comprises one or more of DMG-PEG2000, DMG-C-PEG2000, DSG-PEG2000, C14-PEG2000, C16-PEG2000, and/or C18-PEG2000. In some embodiments, the plurality of LNPs have an average diameter between about 60 nm and about 120 nm. In some embodiments, the concentration of LNPs in the pharmaceutical composition is between 0.001 and 3 mg/ml. In some embodiments, the pharmaceutical composition targeting an CXCL8 gene is formulated for treating one or more disorders selected from (i) a joint disease or illness (e.g., arthritis, post-traumatic arthritis, osteoarthritis, rheumatoid arthritis, psoriatic arthritis, lupus, ankylosing spondylitis, reactive arthritis, septic arthritis, juvenile idiopathic arthritis, fibromyalgia, crystal arthropathies, gout, pseudogout, or CPPD disease/chondrocalcinosis), (ii) a spinal condition or disorder (e.g. discogenic disease, low back pain, neck pain, lumbar pain, degenerative disc disease, annual ligament tear, herniated disc, spinal facet joint arthritis, intervertebral disc disease, spondylosis, painful scoliosis, or spinal stenosis), (iii) a musculoskeletal disorder (e.g. fibrosis, scarring, infectious intermittent joint effusion, spondylarthritis, plantar fasciitis, degenerative polyarthritis, hemophilic arthropathy, inflammatory myopathy with abundant macrophages, or polymyositis), and/or any combinations thereof.

### JJ. CXCR1

[0708] In some embodiments, the disclosure provides one or more pharmaceutical compositions targeting an CXCR1 gene, the composition comprising a plurality of LNPs, wherein the LNPs comprise an RNA-guided nuclease or a nucleic acid encoding an RNA-guided nuclease and at least one guide RNA or a nucleic acid encoding at least one guide RNA targeting an CXCR1 gene, and an LNP system selected from any one of LNP001 to LNP240. In some embodiments, the at least one guide RNA has a crRNA sequence selected from SEQ ID NOs: 637-655. In some embodiments, the LNP system comprises the steroid component in a molar ratio from about 36 to about 46, or from about 38 to about 42. In some embodiments, the LNP system comprises the steroid component in a molar ratio of about 37, about 38, about 39, about 40, about 41, or about 42. In some embodiments, the steroid component comprises cholesterol. In some embodiments, the steroid component comprises cholesterol and one or more additional steroids, wherein cholesterol is about 60% (w/w) or more, about 65% (w/w) or more, about 70% (w/w) or more, about 75% (w/w) or more, or about 80% (w/w) or more of the steroid component. In some embodiments, the steroid component comprises dexamethasone. In some embodiments, the steroid component comprises a modified cholesterol, e.g., a hydroxy- or alkyl modification. In some embodiments, the steroid component comprises any other steroid disclosed herein. In some embodiments, the LNP system comprises the PEGylated Lipid Component in a molar ratio from about 1.5 to about 2.5. In some embodiments, the PEGylated Lipid Component comprises a PEG2000 lipid. In some embodiments, the PEGylated Lipid Component comprises one or more of DMG-PEG and/or DMG-C-PEG. In some embodiments, the PEGylated Lipid Component comprises one or more of DMG-PEG2000, DMG-C-PEG2000, DSG-PEG2000, C14-PEG2000, C16-PEG2000, and/or C18-PEG2000. In some embodiments, the plurality of LNPs have an average diameter between about 60 nm and about 120 nm. In some embodiments, the concentration of LNPs in the pharmaceutical composition is between 0.001 and 3 mg/ml. In some embodiments, the pharmaceutical composition targeting an CXCR1 gene is formulated for treating one or more disorders selected from (i) a joint disease or illness (e.g., arthritis, post-traumatic arthritis, osteoarthritis, rheumatoid arthritis, psoriatic arthritis, lupus, ankylosing spondylitis, reactive arthritis, septic arthritis, juvenile idiopathic arthritis, fibromyalgia, crystal arthropathies, gout, pseudogout, or CPPD disease/chondrocalcinosis), (ii) a spinal condition or disorder (e.g. discogenic disease, low back pain, neck pain, lumbar pain, degenerative disc disease, annual ligament tear, herniated disc, spinal facet joint arthritis, intervertebral disc disease, spondylosis, painful scoliosis, or spinal stenosis), (iii) a musculoskeletal disorder (e.g. fibrosis, scarring, infectious intermittent joint effusion, spondylarthritis, plantar fasciitis, degenerative polyarthritis, hemophilic arthropathy, inflammatory myopathy with abundant macrophages, or polymyositis), and/or any combinations thereof.

### KK. CXCR2

[0709] In some embodiments, the disclosure provides one or more pharmaceutical compositions targeting an CXCR2 gene, the composition comprising a plurality of LNPs, wherein the LNPs comprise an RNA-guided nuclease or a nucleic acid encoding an RNA-guided nuclease and at least one guide RNA or a nucleic acid encoding at least one guide RNA targeting an CXCR2 gene, and an LNP system selected from any one of LNP001 to LNP240. In some embodiments, the at least one guide RNA has a crRNA sequence selected from SEQ ID NOs: 656-672. In some embodiments, the LNP system comprises the steroid component in a molar ratio from about 36 to about 46, or from about 38 to about 42. In some embodiments, the LNP system comprises the steroid component in a molar ratio of about 37, about 38, about 39, about 40, about 41, or about 42. In some embodiments, the steroid component comprises cholesterol. In some embodiments, the steroid component comprises cholesterol and one or more additional steroids, wherein cholesterol is about 60% (w/w) or more, about 65% (w/w) or more, about 70% (w/w) or more, about 75% (w/w) or more, or about 80% (w/w) or more of the steroid component. In some embodiments, the steroid component comprises dexamethasone. In some embodiments, the steroid component comprises a modified cholesterol, e.g., a hydroxy- or alkyl modification. In some embodiments, the steroid component comprises any other steroid disclosed herein. In some embodiments, the LNP system comprises the PEGylated Lipid Component in a molar ratio from about 1.5 to about 2.5. In some embodiments, the PEGylated Lipid Component comprises a PEG2000 lipid. In some embodiments, the PEGylated Lipid Component comprises one or more of DMG-PEG and/or DMG-C-PEG. In some embodiments, the PEGylated Lipid Component comprises one or more of DMG-PEG2000, DMG-C-PEG2000, DSG-PEG2000, C14-PEG2000, C16-PEG2000, and/or C18-PEG2000. In some embodiments, the plurality of LNPs have an average diameter between about 60 nm and about 120 nm. In some embodiments, the concentration of LNPs in the pharmaceutical composition is between 0.001 and 3 mg/ml. In some embodiments, the pharmaceutical composition targeting an CXCR2 gene is formulated for treating one or more disorders selected from (i) a joint disease or illness (e.g., arthritis, post-traumatic arthritis, osteoarthritis, rheumatoid arthritis, psoriatic arthritis, lupus, ankylosing spondylitis, reactive arthritis, septic arthritis, juvenile idiopathic arthritis, fibromyalgia, crystal arthropathies, gout, pseudogout, or CPPD disease/chondrocalcinosis), (ii) a spinal condition or disorder (e.g. discogenic disease, low back pain, neck pain, lumbar pain, degenerative disc disease, annual ligament tear, herniated disc, spinal facet joint arthritis, intervertebral disc disease, spondylosis, painful scoliosis, or spinal stenosis), (iii) a musculoskeletal disorder (e.g. fibrosis, scarring, infectious intermittent joint effusion, spondylarthritis, plantar fasciitis, degenerative polyarthritis, hemophilic arthropathy, inflammatory myopathy with abundant macrophages, or polymyositis), and/or any combinations thereof.

### LL. FGF2

[0710] In some embodiments, the disclosure provides one or more pharmaceutical compositions targeting an FGF2 gene, the composition comprising a plurality of LNPs, wherein the LNPs comprise an RNA-guided nuclease or a nucleic acid encoding an RNA-guided nuclease and at least one guide RNA or a nucleic acid encoding at least one guide RNA targeting an FGF2 gene, and an LNP system selected from any one of LNP001 to LNP240. In some embodiments, the at least one guide RNA has a crRNA sequence selected from SEQ ID NOs: 673-720. In some embodiments, the LNP system comprises the steroid component in a molar ratio from about 36 to about 46, or from about 38 to about 42. In some embodiments, the LNP system comprises the steroid component in a molar ratio of about 37, about 38, about 39, about 40, about 41, or about 42. In some embodiments, the steroid component comprises cholesterol. In some embodiments, the steroid component comprises cholesterol and one or more additional steroids, wherein cholesterol is about 60% (w/w) or more, about 65% (w/w) or more, about 70% (w/w) or more, about 75% (w/w) or more, or about 80% (w/w) or more of the steroid component. In some embodiments, the steroid component comprises dexamethasone. In some embodiments, the steroid component comprises a modified cholesterol, e.g., a hydroxy- or alkyl modification. In some embodiments, the steroid component comprises any other steroid disclosed herein. In some embodiments, the LNP system comprises the PEGylated Lipid Component in a molar ratio from about 1.5 to about 2.5. In some embodiments, the PEGylated Lipid Component comprises a PEG2000 lipid. In some embodiments, the PEGylated Lipid Component comprises one or more of DMG-PEG and/or DMG-C-PEG. In some embodiments, the PEGylated Lipid Component comprises one or more of DMG-PEG2000, DMG-C-PEG2000, DSG-PEG2000, C14-PEG2000, C16-PEG2000, and/or C18-PEG2000. In some embodiments, the plurality of LNPs have an average diameter between about 60 nm and about 120 nm. In some embodiments, the concentration of LNPs in the pharmaceutical composition is between 0.001 and 3 mg/ml. In some embodiments, the pharmaceutical composition targeting an FGF2 gene is formulated for treating one or more disorders selected from (i) a joint disease or illness (e.g., arthritis, post-traumatic arthritis, osteoarthritis, rheumatoid arthritis, psoriatic arthritis, lupus, ankylosing spondylitis, reactive arthritis, septic arthritis, juvenile idiopathic arthritis, fibromyalgia, crystal arthropathies, gout, pseudogout, or CPPD disease/chondrocalcinosis), (ii) a spinal condition or disorder (e.g. discogenic disease, low back pain, neck pain, lumbar pain, degenerative disc disease, annual ligament tear, herniated disc, spinal facet joint arthritis, intervertebral disc disease, spondylosis, painful scoliosis, or spinal stenosis), (iii) a musculoskeletal disorder (e.g. fibrosis, scarring, infectious intermittent joint effusion, spondylarthritis, plantar fasciitis, degenerative polyarthritis, hemophilic arthropathy, inflammatory myopathy with abundant macrophages, or polymyositis), and/or any combinations thereof.

### MM. FGFR1

[0711] In some embodiments, the disclosure provides one or more pharmaceutical compositions targeting an FGFR1 gene, the composition comprising a plurality of LNPs, wherein the LNPs comprise an RNA-guided nuclease or a nucleic acid encoding an RNA-guided nuclease and at least one guide RNA or a nucleic acid encoding at least one guide RNA targeting an FGFR1 gene, and an LNP system selected from any one of LNP001 to LNP240. In some embodiments, the at least one guide RNA has a crRNA sequence selected from SEQ ID NOs: 721-768. In some embodiments, the LNP system comprises the steroid component in a molar ratio from about 36 to about 46, or from about 38 to about 42. In some embodiments, the LNP system comprises the steroid component in a molar ratio of about 37, about 38, about 39, about 40, about 41, or about 42. In some embodiments, the steroid component comprises cholesterol. In some embodiments, the steroid component comprises cholesterol and one or more additional steroids, wherein cholesterol is about 60% (w/w) or more, about 65% (w/w) or more, about 70% (w/w) or more, about 75% (w/w) or more, or about 80% (w/w) or more of the steroid component. In some embodiments, the steroid component comprises dexamethasone. In some embodiments, the steroid component comprises a modified cholesterol, e.g., a hydroxy- or alkyl modification. In some embodiments, the steroid component comprises any other steroid disclosed herein. In some embodiments, the LNP system comprises the PEGylated Lipid Component in a molar ratio from about 1.5 to about 2.5. In some embodiments, the PEGylated Lipid Component comprises a PEG2000 lipid. In some embodiments, the PEGylated Lipid Component comprises one or more of DMG-PEG and/or DMG-C-PEG. In some embodiments, the PEGylated Lipid Component comprises one or more of DMG-PEG2000, DMG-C-PEG2000, DSG-PEG2000, C14-PEG2000, C16-PEG2000, and/or C18-PEG2000. In some embodiments, the plurality of LNPs have an average diameter between about 60 nm and about 120 nm. In some embodiments, the concentration of LNPs in the pharmaceutical composition is between 0.001 and 3 mg/ml. In some embodiments, the pharmaceutical composition targeting an FGFR1 gene is formulated for treating one or more disorders selected from (i) a joint disease or illness (e.g., arthritis, post-traumatic arthritis, osteoarthritis, rheumatoid arthritis, psoriatic arthritis, lupus, ankylosing spondylitis, reactive arthritis, septic arthritis, juvenile idiopathic arthritis, fibromyalgia, crystal arthropathies, gout, pseudogout, or CPPD disease/chondrocalcinosis), (ii) a spinal condition or disorder (e.g. discogenic disease, low back pain, neck pain, lumbar pain, degenerative disc disease, annual ligament tear, herniated disc, spinal facet joint arthritis, intervertebral disc disease, spondylosis, painful scoliosis, or spinal stenosis), (iii) a musculoskeletal disorder (e.g. fibrosis, scarring, infectious intermittent joint effusion, spondylarthritis, plantar fasciitis, degenerative polyarthritis, hemophilic arthropathy, inflammatory myopathy with abundant macrophages, or polymyositis), and/or any combinations thereof.

### NN. IL10

[0712] In some embodiments, the disclosure provides one or more pharmaceutical compositions targeting an IL10 gene, the composition comprising a plurality of LNPs, wherein the LNPs comprise an RNA-guided nuclease or a nucleic acid encoding an RNA-guided nuclease and at least one guide RNA or a nucleic acid encoding at least one guide RNA targeting an IL10 gene, and an LNP system selected from any one of LNP001 to LNP240. In some embodiments, the at least one guide RNA has a crRNA sequence selected from SEQ ID NOs: 991-1007. In some embodiments, the LNP system comprises the steroid component in a molar ratio from about 36 to about 46, or from about 38 to about 42. In some embodiments, the LNP system comprises the steroid component in a molar ratio of about 37, about 38, about 39, about 40, about 41, or about 42. In some embodiments, the steroid component comprises cholesterol. In some embodiments, the steroid component comprises cholesterol and one or more additional steroids, wherein cholesterol is about 60% (w/w) or more, about 65% (w/w) or more, about 70% (w/w) or more, about 75% (w/w) or more, or about 80% (w/w) or more of the steroid component. In some embodiments, the steroid component comprises dexamethasone. In some embodiments, the steroid component comprises a modified cholesterol, e.g., a hydroxy- or alkyl modification. In some embodiments, the steroid component comprises any other steroid disclosed herein. In some embodiments, the LNP system comprises the PEGylated Lipid Component in a molar ratio from about 1.5 to about 2.5. In some embodiments, the PEGylated Lipid Component comprises a PEG2000 lipid. In some embodiments, the PEGylated Lipid Component comprises one or more of DMG-PEG and/or DMG-C-PEG. In some embodiments, the PEGylated Lipid Component comprises one or more of DMG-PEG2000, DMG-C-PEG2000, DSG-PEG2000, C14-PEG2000, C16-PEG2000, and/or C18-PEG2000. In some embodiments, the plurality of LNPs have an average diameter between about 60 nm and about 120 nm. In some embodiments, the concentration of LNPs in the pharmaceutical composition is between 0.001 and 3 mg/ml. In some embodiments, the pharmaceutical composition targeting an IL10 gene is formulated for treating one or more disorders selected from (i) a joint disease or illness (e.g., arthritis, post-traumatic arthritis, osteoarthritis, rheumatoid arthritis, psoriatic arthritis, lupus, ankylosing spondylitis, reactive arthritis, septic arthritis, juvenile idiopathic arthritis, fibromyalgia, crystal arthropathies, gout, pseudogout, or CPPD disease/chondrocalcinosis), (ii) a spinal condition or disorder (e.g. discogenic disease, low back pain, neck pain, lumbar pain, degenerative disc disease, annual ligament tear, herniated disc, spinal facet joint arthritis, intervertebral disc disease, spondylosis, painful scoliosis, or spinal stenosis), (iii) a musculoskeletal disorder (e.g. fibrosis, scarring, infectious intermittent joint effusion, spondylarthritis, plantar fasciitis, degenerative polyarthritis, hemophilic arthropathy, inflammatory myopathy with abundant macrophages, or polymyositis), and/or any combinations thereof.

### OO. IL10RA

[0713] In some embodiments, the disclosure provides one or more pharmaceutical compositions targeting an IL10RA gene, the composition comprising a plurality of LNPs, wherein the LNPs comprise an RNA-guided nuclease or a nucleic acid encoding an RNA-guided nuclease and at least one guide RNA or a nucleic acid encoding at least one guide RNA targeting an IL10RA gene, and an LNP system selected from any one of LNP001 to LNP240. In some embodiments, the at least one guide RNA has a crRNA sequence selected from SEQ ID NOs: 1008-1055. In some embodiments, the LNP system comprises the steroid component in a molar ratio from about 36 to about 46, or from about 38 to about 42. In some embodiments, the LNP system comprises the steroid component in a molar ratio of about 37, about 38, about 39, about 40, about 41, or about 42. In some embodiments, the steroid component comprises cholesterol. In some embodiments, the steroid component comprises cholesterol and one or more additional steroids, wherein cholesterol is about 60% (w/w) or more, about 65% (w/w) or more, about 70% (w/w) or more, about 75% (w/w) or more, or about 80% (w/w) or more of the steroid component. In some embodiments, the steroid component comprises dexamethasone. In some embodiments, the steroid component comprises a modified cholesterol, e.g., a hydroxy- or alkyl modification. In some embodiments, the steroid component comprises any other steroid disclosed herein. In some embodiments, the LNP system comprises the PEGylated Lipid Component in a molar ratio from about 1.5 to about 2.5. In some embodiments, the PEGylated Lipid Component comprises a PEG2000 lipid. In some embodiments, the PEGylated Lipid Component comprises one or more of DMG-PEG and/or DMG-C-PEG. In some embodiments, the PEGylated Lipid Component comprises one or more of DMG-PEG2000, DMG-C-PEG2000, DSG-PEG2000, C14-PEG2000, C16-PEG2000, and/or C18-PEG2000. In some embodiments, the plurality of LNPs have an average diameter between about 60 nm and about 120 nm. In some embodiments, the concentration of LNPs in the pharmaceutical composition is between 0.001 and 3 mg/ml. In some embodiments, the pharmaceutical composition targeting an IL10RA gene is formulated for treating one or more disorders selected from (i) a joint disease or illness (e.g., arthritis, post-traumatic arthritis, osteoarthritis, rheumatoid arthritis, psoriatic arthritis, lupus, ankylosing spondylitis, reactive arthritis, septic arthritis, juvenile idiopathic arthritis, fibromyalgia, crystal arthropathies, gout, pseudogout, or CPPD disease/chondrocalcinosis), (ii) a spinal condition or disorder (e.g. discogenic disease, low back pain, neck pain, lumbar pain, degenerative disc disease, annual ligament tear, herniated disc, spinal facet joint arthritis, intervertebral disc disease, spondylosis, painful scoliosis, or spinal stenosis), (iii) a musculoskeletal disorder (e.g. fibrosis, scarring, infectious intermittent joint effusion, spondylarthritis, plantar fasciitis, degenerative polyarthritis, hemophilic arthropathy, inflammatory myopathy with abundant macrophages, or polymyositis), and/or any combinations thereof.

### PP. IL10RB

[0714] In some embodiments, the disclosure provides one or more pharmaceutical compositions targeting an IL10RB gene, the composition comprising a plurality of LNPs, wherein the LNPs comprise an RNA-guided nuclease or a nucleic acid encoding an RNA-guided nuclease and at least one guide RNA or a nucleic acid encoding at least one guide RNA targeting an IL10RB gene, and an LNP system selected from any one of LNP001 to LNP240. In some embodiments, the at least one guide RNA has a crRNA sequence selected from SEQ ID NOs: 1056-1082. In some embodiments, the LNP system comprises the steroid component in a molar ratio from about 36 to about 46, or from about 38 to about 42. In some embodiments, the LNP system comprises the steroid component in a molar ratio of about 37, about 38, about 39, about 40, about 41, or about 42. In some embodiments, the steroid component comprises cholesterol. In some embodiments, the steroid component comprises cholesterol and one or more additional steroids, wherein cholesterol is about 60% (w/w) or more, about 65% (w/w) or more, about 70% (w/w) or more, about 75% (w/w) or more, or about 80% (w/w) or more of the steroid component. In some embodiments, the steroid component comprises dexamethasone. In some embodiments, the steroid component comprises a modified cholesterol, e.g., a hydroxy- or alkyl modification. In some embodiments, the steroid component comprises any other steroid disclosed herein. In some embodiments, the LNP system comprises the PEGylated Lipid Component in a molar ratio from about 1.5 to about 2.5. In some embodiments, the PEGylated Lipid Component comprises a PEG2000 lipid. In some embodiments, the PEGylated Lipid Component comprises one or more of DMG-PEG and/or DMG-C-PEG. In some embodiments, the PEGylated Lipid Component comprises one or more of DMG-PEG2000, DMG-C-PEG2000, DSG-PEG2000, C14-PEG2000, C16-PEG2000, and/or C18-PEG2000. In some embodiments, the plurality of LNPs have an average diameter between about 60 nm and about 120 nm. In some embodiments, the concentration of LNPs in the pharmaceutical composition is between 0.001 and 3 mg/ml. In some embodiments, the pharmaceutical composition targeting an IL10RB gene is formulated for treating one or more disorders selected from (i) a joint disease or illness (e.g., arthritis, post-traumatic arthritis, osteoarthritis, rheumatoid arthritis, psoriatic arthritis, lupus, ankylosing spondylitis, reactive arthritis, septic arthritis, juvenile idiopathic arthritis, fibromyalgia, crystal arthropathies, gout, pseudogout, or CPPD disease/chondrocalcinosis), (ii) a spinal condition or disorder (e.g. discogenic disease, low back pain, neck pain, lumbar pain, degenerative disc disease, annual ligament tear, herniated disc, spinal facet joint arthritis, intervertebral disc disease, spondylosis, painful scoliosis, or spinal stenosis), (iii) a musculoskeletal disorder (e.g. fibrosis, scarring, infectious intermittent joint effusion, spondylarthritis, plantar fasciitis, degenerative polyarthritis, hemophilic arthropathy, inflammatory myopathy with abundant macrophages, or polymyositis), and/or any combinations thereof.

### QQ. IL13

[0715] In some embodiments, the disclosure provides one or more pharmaceutical compositions targeting an IL13 gene, the composition comprising a plurality of LNPs, wherein the LNPs comprise an RNA-guided nuclease or a nucleic acid encoding an RNA-guided nuclease and at least one guide RNA or a nucleic acid encoding at least one guide RNA targeting an IL13 gene, and an LNP system selected from any one of LNP001 to LNP240. In some embodiments, the at least one guide RNA has a crRNA sequence selected from SEQ ID NOs: 1083-1104. In some embodiments, the LNP system comprises the steroid component in a molar ratio from about 36 to about 46, or from about 38 to about 42. In some embodiments, the LNP system comprises the steroid component in a molar ratio of about 37, about 38, about 39, about 40, about 41, or about 42. In some embodiments, the steroid component comprises cholesterol. In some embodiments, the steroid component comprises cholesterol and one or more additional steroids, wherein cholesterol is about 60% (w/w) or more, about 65% (w/w) or more, about 70% (w/w) or more, about 75% (w/w) or more, or about 80% (w/w) or more of the steroid component. In some embodiments, the steroid component comprises dexamethasone. In some embodiments, the steroid component comprises a modified cholesterol, e.g., a hydroxy- or alkyl modification. In some embodiments, the steroid component comprises any other steroid disclosed herein. In some embodiments, the LNP system comprises the PEGylated Lipid Component in a molar ratio from about 1.5 to about 2.5. In some embodiments, the PEGylated Lipid Component comprises a PEG2000 lipid. In some embodiments, the PEGylated Lipid Component comprises one or more of DMG-PEG and/or DMG-C-PEG. In some embodiments, the PEGylated Lipid Component comprises one or more of DMG-PEG2000, DMG-C-PEG2000, DSG-PEG2000, C14-PEG2000, C16-PEG2000, and/or C18-PEG2000. In some embodiments, the plurality of LNPs have an average diameter between about 60 nm and about 120 nm. In some embodiments, the concentration of LNPs in the pharmaceutical composition is between 0.001 and 3 mg/ml. In some embodiments, the pharmaceutical composition targeting an IL13 gene is formulated for treating one or more disorders selected from (i) a joint disease or illness (e.g., arthritis, post-traumatic arthritis, osteoarthritis, rheumatoid arthritis, psoriatic arthritis, lupus, ankylosing spondylitis, reactive arthritis, septic arthritis, juvenile idiopathic arthritis, fibromyalgia, crystal arthropathies, gout, pseudogout, or CPPD disease/chondrocalcinosis), (ii) a spinal condition or disorder (e.g. discogenic disease, low back pain, neck pain, lumbar pain, degenerative disc disease, annual ligament tear, herniated disc, spinal facet joint arthritis, intervertebral disc disease, spondylosis, painful scoliosis, or spinal stenosis), (iii) a musculoskeletal disorder (e.g. fibrosis, scarring, infectious intermittent joint effusion, spondylarthritis, plantar fasciitis, degenerative polyarthritis, hemophilic arthropathy, inflammatory myopathy with abundant macrophages, or polymyositis), and/or any combinations thereof.

### RR. IL13RA1

[0716] In some embodiments, the disclosure provides one or more pharmaceutical compositions targeting an IL13RA1 gene, the composition comprising a plurality of LNPs, wherein the LNPs comprise an RNA-guided nuclease or a nucleic acid encoding an RNA-guided nuclease and at least one guide RNA or a nucleic acid encoding at least one guide RNA targeting an IL13RA1 gene, and an LNP system selected from any one of LNP001 to LNP240. In some embodiments, the at least one guide RNA has a crRNA sequence selected from SEQ ID NOs: 1105-1130. In some embodiments, the LNP system comprises the steroid component in a molar ratio from about 36 to about 46, or from about 38 to about 42. In some embodiments, the LNP system comprises the steroid component in a molar ratio of about 37, about 38, about 39, about 40, about 41, or about 42. In some embodiments, the steroid component comprises cholesterol. In some embodiments, the steroid component comprises cholesterol and one or more additional steroids, wherein cholesterol is about 60% (w/w) or more, about 65% (w/w) or more, about 70% (w/w) or more, about 75% (w/w) or more, or about 80% (w/w) or more of the steroid component. In some embodiments, the steroid component comprises dexamethasone. In some embodiments, the steroid component comprises a modified cholesterol, e.g., a hydroxy- or alkyl modification. In some embodiments, the steroid component comprises any other steroid disclosed herein. In some embodiments, the LNP system comprises the PEGylated Lipid Component in a molar ratio from about 1.5 to about 2.5. In some embodiments, the PEGylated Lipid Component comprises a PEG2000 lipid. In some embodiments, the PEGylated Lipid Component comprises one or more of DMG-PEG and/or DMG-C-PEG. In some embodiments, the PEGylated Lipid Component comprises one or more of DMG-PEG2000, DMG-C-PEG2000, DSG-PEG2000, C14-PEG2000, C16-PEG2000, and/or C18-PEG2000. In some embodiments, the plurality of LNPs have an average diameter between about 60 nm and about 120 nm. In some embodiments, the concentration of LNPs in the pharmaceutical composition is between 0.001 and 3 mg/ml. In some embodiments, the pharmaceutical composition targeting an IL13RA1 gene is formulated for treating one or more disorders selected from (i) a joint disease or illness (e.g., arthritis, post-traumatic arthritis, osteoarthritis, rheumatoid arthritis, psoriatic arthritis, lupus, ankylosing spondylitis, reactive arthritis, septic arthritis, juvenile idiopathic arthritis, fibromyalgia, crystal arthropathies, gout, pseudogout, or CPPD disease/chondrocalcinosis), (ii) a spinal condition or disorder (e.g. discogenic disease, low back pain, neck pain, lumbar pain, degenerative disc disease, annual ligament tear, herniated disc, spinal facet joint arthritis, intervertebral disc disease, spondylosis, painful scoliosis, or spinal stenosis), (iii) a musculoskeletal disorder (e.g. fibrosis, scarring, infectious intermittent joint effusion, spondylarthritis, plantar fasciitis, degenerative polyarthritis, hemophilic arthropathy, inflammatory myopathy with abundant macrophages, or polymyositis), and/or any combinations thereof.

### SS. IL13RA2

[0717] In some embodiments, the disclosure provides one or more pharmaceutical compositions targeting an IL13RA2 gene, the composition comprising a plurality of LNPs, wherein the LNPs comprise an RNA-guided nuclease or a nucleic acid encoding an RNA-guided nuclease and at least one guide RNA or a nucleic acid encoding at least one guide RNA targeting an IL13RA2 gene, and an LNP system selected from any one of LNP001 to LNP240. In some embodiments, the at least one guide RNA has a crRNA sequence selected from SEQ ID NOs: 1131-1147. In some embodiments, the LNP system comprises the steroid component in a molar ratio from about 36 to about 46, or from about 38 to about 42. In some embodiments, the LNP system comprises the steroid component in a molar ratio of about 37, about 38, about 39, about 40, about 41, or about 42. In some embodiments, the steroid component comprises cholesterol. In some embodiments, the steroid component comprises cholesterol and one or more additional steroids, wherein cholesterol is about 60% (w/w) or more, about 65% (w/w) or more, about 70% (w/w) or more, about 75% (w/w) or more, or about 80% (w/w) or more of the steroid component. In some embodiments, the steroid component comprises dexamethasone. In some embodiments, the steroid component comprises a modified cholesterol, e.g., a hydroxy- or alkyl modification. In some embodiments, the steroid component comprises any other steroid disclosed herein. In some embodiments, the LNP system comprises the PEGylated Lipid Component in a molar ratio from about 1.5 to about 2.5. In some embodiments, the PEGylated Lipid Component comprises a PEG2000 lipid. In some embodiments, the PEGylated Lipid Component comprises one or more of DMG-PEG and/or DMG-C-PEG. In some embodiments, the PEGylated Lipid Component comprises one or more of DMG-PEG2000, DMG-C-PEG2000, DSG-PEG2000, C14-PEG2000, C16-PEG2000, and/or C18-PEG2000. In some embodiments, the plurality of LNPs have an average diameter between about 60 nm and about 120 nm. In some embodiments, the concentration of LNPs in the pharmaceutical composition is between 0.001 and 3 mg/ml. In some embodiments, the pharmaceutical composition targeting an IL13RA2 gene is formulated for treating one or more disorders selected from (i) a joint disease or illness (e.g., arthritis, post-traumatic arthritis, osteoarthritis, rheumatoid arthritis, psoriatic arthritis, lupus, ankylosing spondylitis, reactive arthritis, septic arthritis, juvenile idiopathic arthritis, fibromyalgia, crystal arthropathies, gout, pseudogout, or CPPD disease/chondrocalcinosis), (ii) a spinal condition or disorder (e.g. discogenic disease, low back pain, neck pain, lumbar pain, degenerative disc disease, annual ligament tear, herniated disc, spinal facet joint arthritis, intervertebral disc disease, spondylosis, painful scoliosis, or spinal stenosis), (iii) a musculoskeletal disorder (e.g. fibrosis, scarring, infectious intermittent joint effusion, spondylarthritis, plantar fasciitis, degenerative polyarthritis, hemophilic arthropathy, inflammatory myopathy with abundant macrophages, or polymyositis), and/or any combinations thereof.

### TT. IL17A

[0718] In some embodiments, the disclosure provides one or more pharmaceutical compositions targeting an IL17A gene, the composition comprising a plurality of LNPs, wherein the LNPs comprise an RNA-guided nuclease or a nucleic acid encoding an RNA-guided nuclease and at least one guide RNA or a nucleic acid encoding at least one guide RNA targeting an IL17A gene, and an LNP system selected from any one of LNP001 to LNP240. In some embodiments, the at least one guide RNA has a crRNA sequence selected from SEQ ID NOs: 1148-1173. In some embodiments, the LNP system comprises the steroid component in a molar ratio from about 36 to about 46, or from about 38 to about 42. In some embodiments, the LNP system comprises the steroid component in a molar ratio of about 37, about 38, about 39, about 40, about 41, or about 42. In some embodiments, the steroid component comprises cholesterol. In some embodiments, the steroid component comprises cholesterol and one or more additional steroids, wherein cholesterol is about 60% (w/w) or more, about 65% (w/w) or more, about 70% (w/w) or more, about 75% (w/w) or more, or about 80% (w/w) or more of the steroid component. In some embodiments, the steroid component comprises dexamethasone. In some embodiments, the steroid component comprises a modified cholesterol, e.g., a hydroxy- or alkyl modification. In some embodiments, the steroid component comprises any other steroid disclosed herein. In some embodiments, the LNP system comprises the PEGylated Lipid Component in a molar ratio from about 1.5 to about 2.5. In some embodiments, the PEGylated Lipid Component comprises a PEG2000 lipid. In some embodiments, the PEGylated Lipid Component comprises one or more of DMG-PEG and/or DMG-C-PEG. In some embodiments, the PEGylated Lipid Component comprises one or more of DMG-PEG2000, DMG-C-PEG2000, DSG-PEG2000, C14-PEG2000, C16-PEG2000, and/or C18-PEG2000. In some embodiments, the plurality of LNPs have an average diameter between about 60 nm and about 120 nm. In some embodiments, the concentration of LNPs in the pharmaceutical composition is between 0.001 and 3 mg/ml. In some embodiments, the pharmaceutical composition targeting an IL17A gene is formulated for treating one or more disorders selected from (i) a joint disease or illness (e.g., arthritis, post-traumatic arthritis, osteoarthritis, rheumatoid arthritis, psoriatic arthritis, lupus, ankylosing spondylitis, reactive arthritis, septic arthritis, juvenile idiopathic arthritis, fibromyalgia, crystal arthropathies, gout, pseudogout, or CPPD disease/chondrocalcinosis), (ii) a spinal condition or disorder (e.g. discogenic disease, low back pain, neck pain, lumbar pain, degenerative disc disease, annual ligament tear, herniated disc, spinal facet joint arthritis, intervertebral disc disease, spondylosis, painful scoliosis, or spinal stenosis), (iii) a musculoskeletal disorder (e.g. fibrosis, scarring, infectious intermittent joint effusion, spondylarthritis, plantar fasciitis, degenerative polyarthritis, hemophilic arthropathy, inflammatory myopathy with abundant macrophages, or polymyositis), and/or any combinations thereof.

### UU. IL17RA

[0719] In some embodiments, the disclosure provides one or more pharmaceutical compositions targeting an IL17RA gene, the composition comprising a plurality of LNPs, wherein the LNPs comprise an RNA-guided nuclease or a nucleic acid encoding an RNA-guided nuclease and at least one guide RNA or a nucleic acid encoding at least one guide RNA targeting an IL17RA gene, and an LNP system selected from any one of LNP001 to LNP240. In some embodiments, the at least one guide RNA has a crRNA sequence selected from SEQ ID NOs: 1174-1221. In some embodiments, the LNP system comprises the steroid component in a molar ratio from about 36 to about 46, or from about 38 to about 42. In some embodiments, the LNP system comprises the steroid component in a molar ratio of about 37, about 38, about 39, about 40, about 41, or about 42. In some embodiments, the steroid component comprises cholesterol. In some embodiments, the steroid component comprises cholesterol and one or more additional steroids, wherein cholesterol is about 60% (w/w) or more, about 65% (w/w) or more, about 70% (w/w) or more, about 75% (w/w) or more, or about 80% (w/w) or more of the steroid component. In some embodiments, the steroid component comprises dexamethasone. In some embodiments, the steroid component comprises a modified cholesterol, e.g., a hydroxy- or alkyl modification. In some embodiments, the steroid component comprises any other steroid disclosed herein. In some embodiments, the LNP system comprises the PEGylated Lipid Component in a molar ratio from about 1.5 to about 2.5. In some embodiments, the PEGylated Lipid Component comprises a PEG2000 lipid. In some embodiments, the PEGylated Lipid Component comprises one or more of DMG-PEG and/or DMG-C-PEG. In some embodiments, the PEGylated Lipid Component comprises one or more of DMG-PEG2000, DMG-C-PEG2000, DSG-PEG2000, C14-PEG2000, C16-PEG2000, and/or C18-PEG2000. In some embodiments, the plurality of LNPs have an average diameter between about 60 nm and about 120 nm. In some embodiments, the concentration of LNPs in the pharmaceutical composition is between 0.001 and 3 mg/ml. In some embodiments, the pharmaceutical composition targeting an IL17RA gene is formulated for treating one or more disorders selected from (i) a joint disease or illness (e.g., arthritis, post-traumatic arthritis, osteoarthritis, rheumatoid arthritis, psoriatic arthritis, lupus, ankylosing spondylitis, reactive arthritis, septic arthritis, juvenile idiopathic arthritis, fibromyalgia, crystal arthropathies, gout, pseudogout, or CPPD disease/chondrocalcinosis), (ii) a spinal condition or disorder (e.g. discogenic disease, low back pain, neck pain, lumbar pain, degenerative disc disease, annual ligament tear, herniated disc, spinal facet joint arthritis, intervertebral disc disease, spondylosis, painful scoliosis, or spinal stenosis), (iii) a musculoskeletal disorder (e.g. fibrosis, scarring, infectious intermittent joint effusion, spondylarthritis, plantar fasciitis, degenerative polyarthritis, hemophilic arthropathy, inflammatory myopathy with abundant macrophages, or polymyositis), and/or any combinations thereof.

### VV. IL18

[0720] In some embodiments, the disclosure provides one or more pharmaceutical compositions targeting an IL18 gene, the composition comprising a plurality of LNPs, wherein the LNPs comprise an RNA-guided nuclease or a nucleic acid encoding an RNA-guided nuclease and at least one guide RNA or a nucleic acid encoding at least one guide RNA targeting an IL18 gene, and an LNP system selected from any one of LNP001 to LNP240. In some embodiments, the at least one guide RNA has a crRNA sequence selected from SEQ ID NOs: 1222-1238. In some embodiments, the LNP system comprises the steroid component in a molar ratio from about 36 to about 46, or from about 38 to about 42. In some embodiments, the LNP system comprises the steroid component in a molar ratio of about 37, about 38, about 39, about 40, about 41, or about 42. In some embodiments, the steroid component comprises cholesterol. In some embodiments, the steroid component comprises cholesterol and one or more additional steroids, wherein cholesterol is about 60% (w/w) or more, about 65% (w/w) or more, about 70% (w/w) or more, about 75% (w/w) or more, or about 80% (w/w) or more of the steroid component. In some embodiments, the steroid component comprises dexamethasone. In some embodiments, the steroid component comprises a modified cholesterol, e.g., a hydroxy- or alkyl modification. In some embodiments, the steroid component comprises any other steroid disclosed herein. In some embodiments, the LNP system comprises the PEGylated Lipid Component in a molar ratio from about 1.5 to about 2.5. In some embodiments, the PEGylated Lipid Component comprises a PEG2000 lipid. In some embodiments, the PEGylated Lipid Component comprises one or more of DMG-PEG and/or DMG-C-PEG. In some embodiments, the PEGylated Lipid Component comprises one or more of DMG-PEG2000, DMG-C-PEG2000, DSG-PEG2000, C14-PEG2000, C16-PEG2000, and/or C18-PEG2000. In some embodiments, the plurality of LNPs have an average diameter between about 60 nm and about 120 nm. In some embodiments, the concentration of LNPs in the pharmaceutical composition is between 0.001 and 3 mg/ml. In some embodiments, the pharmaceutical composition targeting an IL18 gene is formulated for treating one or more disorders selected from (i) a joint disease or illness (e.g., arthritis, post-traumatic arthritis, osteoarthritis, rheumatoid arthritis, psoriatic arthritis, lupus, ankylosing spondylitis, reactive arthritis, septic arthritis, juvenile idiopathic arthritis, fibromyalgia, crystal arthropathies, gout, pseudogout, or CPPD disease/chondrocalcinosis), (ii) a spinal condition or disorder (e.g. discogenic disease, low back pain, neck pain, lumbar pain, degenerative disc disease, annual ligament tear, herniated disc, spinal facet joint arthritis, intervertebral disc disease, spondylosis, painful scoliosis, or spinal stenosis), (iii) a musculoskeletal disorder (e.g. fibrosis, scarring, infectious intermittent joint effusion, spondylarthritis, plantar fasciitis, degenerative polyarthritis, hemophilic arthropathy, inflammatory myopathy with abundant macrophages, or polymyositis), and/or any combinations thereof.

### WW. IL18R1

[0721] In some embodiments, the disclosure provides one or more pharmaceutical compositions targeting an IL18R1 gene, the composition comprising a plurality of LNPs, wherein the LNPs comprise an RNA-guided nuclease or a nucleic acid encoding an RNA-guided nuclease and at least one guide RNA or a nucleic acid encoding at least one guide RNA targeting an IL18R1 gene, and an LNP system selected from any one of LNP001 to LNP240. In some embodiments, the at least one guide RNA has a crRNA sequence selected from SEQ ID NOs: 1239-1262. In some embodiments, the LNP system comprises the steroid component in a molar ratio from about 36 to about 46, or from about 38 to about 42. In some embodiments, the LNP system comprises the steroid component in a molar ratio of about 37, about 38, about 39, about 40, about 41, or about 42. In some embodiments, the steroid component comprises cholesterol. In some embodiments, the steroid component comprises cholesterol and one or more additional steroids, wherein cholesterol is about 60% (w/w) or more, about 65% (w/w) or more, about 70% (w/w) or more, about 75% (w/w) or more, or about 80% (w/w) or more of the steroid component. In some embodiments, the steroid component comprises dexamethasone. In some embodiments, the steroid component comprises a modified cholesterol, e.g., a hydroxy- or alkyl modification. In some embodiments, the steroid component comprises any other steroid disclosed herein. In some embodiments, the LNP system comprises the PEGylated Lipid Component in a molar ratio from about 1.5 to about 2.5. In some embodiments, the PEGylated Lipid Component comprises a PEG2000 lipid. In some embodiments, the PEGylated Lipid Component comprises one or more of DMG-PEG and/or DMG-C-PEG. In some embodiments, the PEGylated Lipid Component comprises one or more of DMG-PEG2000, DMG-C-PEG2000, DSG-PEG2000, C14-PEG2000, C16-PEG2000, and/or C18-PEG2000. In some embodiments, the plurality of LNPs have an average diameter between about 60 nm and about 120 nm. In some embodiments, the concentration of LNPs in the pharmaceutical composition is between 0.001 and 3 mg/ml. In some embodiments, the pharmaceutical composition targeting an IL18R1 gene is formulated for treating one or more disorders selected from (i) a joint disease or illness (e.g., arthritis, post-traumatic arthritis, osteoarthritis, rheumatoid arthritis, psoriatic arthritis, lupus, ankylosing spondylitis, reactive arthritis, septic arthritis, juvenile idiopathic arthritis, fibromyalgia, crystal arthropathies, gout, pseudogout, or CPPD disease/chondrocalcinosis), (ii) a spinal condition or disorder (e.g. discogenic disease, low back pain, neck pain, lumbar pain, degenerative disc disease, annual ligament tear, herniated disc, spinal facet joint arthritis, intervertebral disc disease, spondylosis, painful scoliosis, or spinal stenosis), (iii) a musculoskeletal disorder (e.g. fibrosis, scarring, infectious intermittent joint effusion, spondylarthritis, plantar fasciitis, degenerative polyarthritis, hemophilic arthropathy, inflammatory myopathy with abundant macrophages, or polymyositis), and/or any combinations thereof.

### XX. IL18RAP

[0722] In some embodiments, the disclosure provides one or more pharmaceutical compositions targeting an IL18RAP gene, the composition comprising a plurality of LNPs, wherein the LNPs comprise an RNA-guided nuclease or a nucleic acid encoding an RNA-guided nuclease and at least one guide RNA or a nucleic acid encoding at least one guide RNA targeting an IL18RAP gene, and an LNP system selected from any one of LNP001 to LNP240. In some embodiments, the at least one guide RNA has a crRNA sequence selected from SEQ ID NOs: 1263-1310. In some embodiments, the LNP system comprises the steroid component in a molar ratio from about 36 to about 46, or from about 38 to about 42. In some embodiments, the LNP system comprises the steroid component in a molar ratio of about 37, about 38, about 39, about 40, about 41, or about 42. In some embodiments, the steroid component comprises cholesterol. In some embodiments, the steroid component comprises cholesterol and one or more additional steroids, wherein cholesterol is about 60% (w/w) or more, about 65% (w/w) or more, about 70% (w/w) or more, about 75% (w/w) or more, or about 80% (w/w) or more of the steroid component. In some embodiments, the steroid component comprises dexamethasone. In some embodiments, the steroid component comprises a modified cholesterol, e.g., a hydroxy- or alkyl modification. In some embodiments, the steroid component comprises any other steroid disclosed herein. In some embodiments, the LNP system comprises the PEGylated Lipid Component in a molar ratio from about 1.5 to about 2.5. In some embodiments, the PEGylated Lipid Component comprises a PEG2000 lipid. In some embodiments, the PEGylated Lipid Component comprises one or more of DMG-PEG and/or DMG-C-PEG. In some embodiments, the PEGylated Lipid Component comprises one or more of DMG-PEG2000, DMG-C-PEG2000, DSG-PEG2000, C14-PEG2000, C16-PEG2000, and/or C18-PEG2000. In some embodiments, the plurality of LNPs have an average diameter between about 60 nm and about 120 nm. In some embodiments, the concentration of LNPs in the pharmaceutical composition is between 0.001 and 3 mg/ml. In some embodiments, the pharmaceutical composition targeting an IL18RAP gene is formulated for treating one or more disorders selected from (i) a joint disease or illness (e.g., arthritis, post-traumatic arthritis, osteoarthritis, rheumatoid arthritis, psoriatic arthritis, lupus, ankylosing spondylitis, reactive arthritis, septic arthritis, juvenile idiopathic arthritis, fibromyalgia, crystal arthropathies, gout, pseudogout, or CPPD disease/chondrocalcinosis), (ii) a spinal condition or disorder (e.g. discogenic disease, low back pain, neck pain, lumbar pain, degenerative disc disease, annual ligament tear, herniated disc, spinal facet joint arthritis, intervertebral disc disease, spondylosis, painful scoliosis, or spinal stenosis), (iii) a musculoskeletal disorder (e.g. fibrosis, scarring, infectious intermittent joint effusion, spondylarthritis, plantar fasciitis, degenerative polyarthritis, hemophilic arthropathy, inflammatory myopathy with abundant macrophages, or polymyositis), and/or any combinations thereof.

### YY. MMP1

[0723] In some embodiments, the disclosure provides one or more pharmaceutical compositions targeting an MMP1 gene, the composition comprising a plurality of LNPs, wherein the LNPs comprise an RNA-guided nuclease or a nucleic acid encoding an RNA-guided nuclease and at least one guide RNA or a nucleic acid encoding at least one guide RNA targeting an MMP1 gene, and an LNP system selected from any one of LNP001 to LNP240. In some embodiments, the at least one guide RNA has a crRNA sequence selected from SEQ ID NOs: 1311-1343. In some embodiments, the LNP system comprises the steroid component in a molar ratio from about 36 to about 46, or from about 38 to about 42. In some embodiments, the LNP system comprises the steroid component in a molar ratio of about 37, about 38, about 39, about 40, about 41, or about 42. In some embodiments, the steroid component comprises cholesterol. In some embodiments, the steroid component comprises cholesterol and one or more additional steroids, wherein cholesterol is about 60% (w/w) or more, about 65% (w/w) or more, about 70% (w/w) or more, about 75% (w/w) or more, or about 80% (w/w) or more of the steroid component. In some embodiments, the steroid component comprises dexamethasone. In some embodiments, the steroid component comprises a modified cholesterol, e.g., a hydroxy- or alkyl modification. In some embodiments, the steroid component comprises any other steroid disclosed herein. In some embodiments, the LNP system comprises the PEGylated Lipid Component in a molar ratio from about 1.5 to about 2.5. In some embodiments, the PEGylated Lipid Component comprises a PEG2000 lipid. In some embodiments, the PEGylated Lipid Component comprises one or more of DMG-PEG and/or DMG-C-PEG. In some embodiments, the PEGylated Lipid Component comprises one or more of DMG-PEG2000, DMG-C-PEG2000, DSG-PEG2000, C14-PEG2000, C16-PEG2000, and/or C18-PEG2000. In some embodiments, the plurality of LNPs have an average diameter between about 60 nm and about 120 nm. In some embodiments, the concentration of LNPs in the pharmaceutical composition is between 0.001 and 3 mg/ml. In some embodiments, the pharmaceutical composition targeting an MMP1 gene is formulated for treating one or more disorders selected from (i) a joint disease or illness (e.g., arthritis, post-traumatic arthritis, osteoarthritis, rheumatoid arthritis, psoriatic arthritis, lupus, ankylosing spondylitis, reactive arthritis, septic arthritis, juvenile idiopathic arthritis, fibromyalgia, crystal arthropathies, gout, pseudogout, or CPPD disease/chondrocalcinosis), (ii) a spinal condition or disorder (e.g. discogenic disease, low back pain, neck pain, lumbar pain, degenerative disc disease, annual ligament tear, herniated disc, spinal facet joint arthritis, intervertebral disc disease, spondylosis, painful scoliosis, or spinal stenosis), (iii) a musculoskeletal disorder (e.g. fibrosis, scarring, infectious intermittent joint effusion, spondylarthritis, plantar fasciitis, degenerative polyarthritis, hemophilic arthropathy, inflammatory myopathy with abundant macrophages, or polymyositis), and/or any combinations thereof.

### ZZ. MMP2

[0724] In some embodiments, the disclosure provides one or more pharmaceutical compositions targeting an MMP2 gene, the composition comprising a plurality of LNPs, wherein the LNPs comprise an RNA-guided nuclease or a nucleic acid encoding an RNA-guided nuclease and at least one guide RNA or a nucleic acid encoding at least one guide RNA targeting an MMP2 gene, and an LNP system selected from any one of LNP001 to LNP240. In some embodiments, the at least one guide RNA has a crRNA sequence selected from SEQ ID NOs: 1344-1391. In some embodiments, the LNP system comprises the steroid component in a molar ratio from about 36 to about 46, or from about 38 to about 42. In some embodiments, the LNP system comprises the steroid component in a molar ratio of about 37, about 38, about 39, about 40, about 41, or about 42. In some embodiments, the steroid component comprises cholesterol. In some embodiments, the steroid component comprises cholesterol and one or more additional steroids, wherein cholesterol is about 60% (w/w) or more, about 65% (w/w) or more, about 70% (w/w) or more, about 75% (w/w) or more, or about 80% (w/w) or more of the steroid component. In some embodiments, the steroid component comprises dexamethasone. In some embodiments, the steroid component comprises a modified cholesterol, e.g., a hydroxy- or alkyl modification. In some embodiments, the steroid component comprises any other steroid disclosed herein. In some embodiments, the LNP system comprises the PEGylated Lipid Component in a molar ratio from about 1.5 to about 2.5. In some embodiments, the PEGylated Lipid Component comprises a PEG2000 lipid. In some embodiments, the PEGylated Lipid Component comprises one or more of DMG-PEG and/or DMG-C-PEG. In some embodiments, the PEGylated Lipid Component comprises one or more of DMG-PEG2000, DMG-C-PEG2000, DSG-PEG2000, C14-PEG2000, C16-PEG2000, and/or C18-PEG2000. In some embodiments, the plurality of LNPs have an average diameter between about 60 nm and about 120 nm. In some embodiments, the concentration of LNPs in the pharmaceutical composition is between 0.001 and 3 mg/ml. In some embodiments, the pharmaceutical composition targeting an MMP2 gene is formulated for treating one or more disorders selected from (i) a joint disease or illness (e.g., arthritis, post-traumatic arthritis, osteoarthritis, rheumatoid arthritis, psoriatic arthritis, lupus, ankylosing spondylitis, reactive arthritis, septic arthritis, juvenile idiopathic arthritis, fibromyalgia, crystal arthropathies, gout, pseudogout, or CPPD disease/chondrocalcinosis), (ii) a spinal condition or disorder (e.g. discogenic disease, low back pain, neck pain, lumbar pain, degenerative disc disease, annual ligament tear, herniated disc, spinal facet joint arthritis, intervertebral disc disease, spondylosis, painful scoliosis, or spinal stenosis), (iii) a musculoskeletal disorder (e.g. fibrosis, scarring, infectious intermittent joint effusion, spondylarthritis, plantar fasciitis, degenerative polyarthritis, hemophilic arthropathy, inflammatory myopathy with abundant macrophages, or polymyositis), and/or any combinations thereof.

### AAA. MMP3

[0725] In some embodiments, the disclosure provides one or more pharmaceutical compositions targeting an MMP3 gene, the composition comprising a plurality of LNPs, wherein the LNPs comprise an RNA-guided nuclease or a nucleic acid encoding an RNA-guided nuclease and at least one guide RNA or a nucleic acid encoding at least one guide RNA targeting an MMP3 gene, and an LNP system selected from any one of LNP001 to LNP240. In some embodiments, the at least one guide RNA has a crRNA sequence selected from SEQ ID NOs: 1392-1417. In some embodiments, the LNP system comprises the steroid component in a molar ratio from about 36 to about 46, or from about 38 to about 42. In some embodiments, the LNP system comprises the steroid component in a molar ratio of about 37, about 38, about 39, about 40, about 41, or about 42. In some embodiments, the steroid component comprises cholesterol. In some embodiments, the steroid component comprises cholesterol and one or more additional steroids, wherein cholesterol is about 60% (w/w) or more, about 65% (w/w) or more, about 70% (w/w) or more, about 75% (w/w) or more, or about 80% (w/w) or more of the steroid component. In some embodiments, the steroid component comprises dexamethasone. In some embodiments, the steroid component comprises a modified cholesterol, e.g., a hydroxy- or alkyl modification. In some embodiments, the steroid component comprises any other steroid disclosed herein. In some embodiments, the LNP system comprises the PEGylated Lipid Component in a molar ratio from about 1.5 to about 2.5. In some embodiments, the PEGylated Lipid Component comprises a PEG2000 lipid. In some embodiments, the PEGylated Lipid Component comprises one or more of DMG-PEG and/or DMG-C-PEG. In some embodiments, the PEGylated Lipid Component comprises one or more of DMG-PEG2000, DMG-C-PEG2000, DSG-PEG2000, C14-PEG2000, C16-PEG2000, and/or C18-PEG2000. In some embodiments, the plurality of LNPs have an average diameter between about 60 nm and about 120 nm. In some embodiments, the concentration of LNPs in the pharmaceutical composition is between 0.001 and 3 mg/ml. In some embodiments, the pharmaceutical composition targeting an MMP3 gene is formulated for treating one or more disorders selected from (i) a joint disease or illness (e.g., arthritis, post-traumatic arthritis, osteoarthritis, rheumatoid arthritis, psoriatic arthritis, lupus, ankylosing spondylitis, reactive arthritis, septic arthritis, juvenile idiopathic arthritis, fibromyalgia, crystal arthropathies, gout, pseudogout, or CPPD disease/chondrocalcinosis), (ii) a spinal condition or disorder (e.g. discogenic disease, low back pain, neck pain, lumbar pain, degenerative disc disease, annual ligament tear, herniated disc, spinal facet joint arthritis, intervertebral disc disease, spondylosis, painful scoliosis, or spinal stenosis), (iii) a musculoskeletal disorder (e.g. fibrosis, scarring, infectious intermittent joint effusion, spondylarthritis, plantar fasciitis, degenerative polyarthritis, hemophilic arthropathy, inflammatory myopathy with abundant macrophages, or polymyositis), and/or any combinations thereof.

### BBB. MMP7

[0726] In some embodiments, the disclosure provides one or more pharmaceutical compositions targeting an MMP7 gene, the composition comprising a plurality of LNPs, wherein the LNPs comprise an RNA-guided nuclease or a nucleic acid encoding an RNA-guided nuclease and at least one guide RNA or a nucleic acid encoding at least one guide RNA targeting an MMP7 gene, and an LNP system selected from any one of LNP001 to LNP240. In some embodiments, the at least one guide RNA has a crRNA sequence selected from SEQ ID NOs: 1418-1436. In some embodiments, the LNP system comprises the steroid component in a molar ratio from about 36 to about 46, or from about 38 to about 42. In some embodiments, the LNP system comprises the steroid component in a molar ratio of about 37, about 38, about 39, about 40, about 41, or about 42. In some embodiments, the steroid component comprises cholesterol. In some embodiments, the steroid component comprises cholesterol and one or more additional steroids, wherein cholesterol is about 60% (w/w) or more, about 65% (w/w) or more, about 70% (w/w) or more, about 75% (w/w) or more, or about 80% (w/w) or more of the steroid component. In some embodiments, the steroid component comprises dexamethasone. In some embodiments, the steroid component comprises a modified cholesterol, e.g., a hydroxy- or alkyl modification. In some embodiments, the steroid component comprises any other steroid disclosed herein. In some embodiments, the LNP system comprises the PEGylated Lipid Component in a molar ratio from about 1.5 to about 2.5. In some embodiments, the PEGylated Lipid Component comprises a PEG2000 lipid. In some embodiments, the PEGylated Lipid Component comprises one or more of DMG-PEG and/or DMG-C-PEG. In some embodiments, the PEGylated Lipid Component comprises one or more of DMG-PEG2000, DMG-C-PEG2000, DSG-PEG2000, C14-PEG2000, C16-PEG2000, and/or C18-PEG2000. In some embodiments, the plurality of LNPs have an average diameter between about 60 nm and about 120 nm. In some embodiments, the concentration of LNPs in the pharmaceutical composition is between 0.001 and 3 mg/ml. In some embodiments, the pharmaceutical composition targeting an MMP7 gene is formulated for treating one or more disorders selected from (i) a joint disease or illness (e.g., arthritis, post-traumatic arthritis, osteoarthritis, rheumatoid arthritis, psoriatic arthritis, lupus, ankylosing spondylitis, reactive arthritis, septic arthritis, juvenile idiopathic arthritis, fibromyalgia, crystal arthropathies, gout, pseudogout, or CPPD disease/chondrocalcinosis), (ii) a spinal condition or disorder (e.g. discogenic disease, low back pain, neck pain, lumbar pain, degenerative disc disease, annual ligament tear, herniated disc, spinal facet joint arthritis, intervertebral disc disease, spondylosis, painful scoliosis, or spinal stenosis), (iii) a musculoskeletal disorder (e.g. fibrosis, scarring, infectious intermittent joint effusion, spondylarthritis, plantar fasciitis, degenerative polyarthritis, hemophilic arthropathy, inflammatory myopathy with abundant macrophages, or polymyositis), and/or any combinations thereof.

### CCC. MMP8

[0727] In some embodiments, the disclosure provides one or more pharmaceutical compositions targeting an MMP8 gene, the composition comprising a plurality of LNPs, wherein the LNPs comprise an RNA-guided nuclease or a nucleic acid encoding an RNA-guided nuclease and at least one guide RNA or a nucleic acid encoding at least one guide RNA targeting an MMP8 gene, and an LNP system selected from any one of LNP001 to LNP240. In some embodiments, the at least one guide RNA has a crRNA sequence selected from SEQ ID NOs: 1437-1474. In some embodiments, the LNP system comprises the steroid component in a molar ratio from about 36 to about 46, or from about 38 to about 42. In some embodiments, the LNP system comprises the steroid component in a molar ratio of about 37, about 38, about 39, about 40, about 41, or about 42. In some embodiments, the steroid component comprises cholesterol. In some embodiments, the steroid component comprises cholesterol and one or more additional steroids, wherein cholesterol is about 60% (w/w) or more, about 65% (w/w) or more, about 70% (w/w) or more, about 75% (w/w) or more, or about 80% (w/w) or more of the steroid component. In some embodiments, the steroid component comprises dexamethasone. In some embodiments, the steroid component comprises a modified cholesterol, e.g., a hydroxy- or alkyl modification. In some embodiments, the steroid component comprises any other steroid disclosed herein. In some embodiments, the LNP system comprises the PEGylated Lipid Component in a molar ratio from about 1.5 to about 2.5. In some embodiments, the PEGylated Lipid Component comprises a PEG2000 lipid. In some embodiments, the PEGylated Lipid Component comprises one or more of DMG-PEG and/or DMG-C-PEG. In some embodiments, the PEGylated Lipid Component comprises one or more of DMG-PEG2000, DMG-C-PEG2000, DSG-PEG2000, C14-PEG2000, C16-PEG2000, and/or C18-PEG2000. In some embodiments, the plurality of LNPs have an average diameter between about 60 nm and about 120 nm. In some embodiments, the concentration of LNPs in the pharmaceutical composition is between 0.001 and 3 mg/ml. In some embodiments, the pharmaceutical composition targeting an MMP8 gene is formulated for treating one or more disorders selected from (i) a joint disease or illness (e.g., arthritis, post-traumatic arthritis, osteoarthritis, rheumatoid arthritis, psoriatic arthritis, lupus, ankylosing spondylitis, reactive arthritis, septic arthritis, juvenile idiopathic arthritis, fibromyalgia, crystal arthropathies, gout, pseudogout, or CPPD disease/chondrocalcinosis), (ii) a spinal condition or disorder (e.g. discogenic disease, low back pain, neck pain, lumbar pain, degenerative disc disease, annual ligament tear, herniated disc, spinal facet joint arthritis, intervertebral disc disease, spondylosis, painful scoliosis, or spinal stenosis), (iii) a musculoskeletal disorder (e.g. fibrosis, scarring, infectious intermittent joint effusion, spondylarthritis, plantar fasciitis, degenerative polyarthritis, hemophilic arthropathy, inflammatory myopathy with abundant macrophages, or polymyositis), and/or any combinations thereof.

### DDD. MMP10

[0728] In some embodiments, the disclosure provides one or more pharmaceutical compositions targeting an MMP10 gene, the composition comprising a plurality of LNPs, wherein the LNPs comprise an RNA-guided nuclease or a nucleic acid encoding an RNA-guided nuclease and at least one guide RNA or a nucleic acid encoding at least one guide RNA targeting an MMP10 gene, and an LNP system selected from any one of LNP001 to LNP240. In some embodiments, the at least one guide RNA has a crRNA sequence selected from SEQ ID NOs: 1475-1497. In some embodiments, the LNP system comprises the steroid component in a molar ratio from about 36 to about 46, or from about 38 to about 42. In some embodiments, the LNP system comprises the steroid component in a molar ratio of about 37, about 38, about 39, about 40, about 41, or about 42. In some embodiments, the steroid component comprises cholesterol. In some embodiments, the steroid component comprises cholesterol and one or more additional steroids, wherein cholesterol is about 60% (w/w) or more, about 65% (w/w) or more, about 70% (w/w) or more, about 75% (w/w) or more, or about 80% (w/w) or more of the steroid component. In some embodiments, the steroid component comprises dexamethasone. In some embodiments, the steroid component comprises a modified cholesterol, e.g., a hydroxy- or alkyl modification. In some embodiments, the steroid component comprises any other steroid disclosed herein. In some embodiments, the LNP system comprises the PEGylated Lipid Component in a molar ratio from about 1.5 to about 2.5. In some embodiments, the PEGylated Lipid Component comprises a PEG2000 lipid. In some embodiments, the PEGylated Lipid Component comprises one or more of DMG-PEG and/or DMG-C-PEG. In some embodiments, the PEGylated Lipid Component comprises one or more of DMG-PEG2000, DMG-C-PEG2000, DSG-PEG2000, C14-PEG2000, C16-PEG2000, and/or C18-PEG2000. In some embodiments, the plurality of LNPs have an average diameter between about 60 nm and about 120 nm. In some embodiments, the concentration of LNPs in the pharmaceutical composition is between 0.001 and 3 mg/ml. In some embodiments, the pharmaceutical composition targeting an MMP10 gene is formulated for treating one or more disorders selected from (i) a joint disease or illness (e.g., arthritis, post-traumatic arthritis, osteoarthritis, rheumatoid arthritis, psoriatic arthritis, lupus, ankylosing spondylitis, reactive arthritis, septic arthritis, juvenile idiopathic arthritis, fibromyalgia, crystal arthropathies, gout, pseudogout, or CPPD disease/chondrocalcinosis), (ii) a spinal condition or disorder (e.g. discogenic disease, low back pain, neck pain, lumbar pain, degenerative disc disease, annual ligament tear, herniated disc, spinal facet joint arthritis, intervertebral disc disease, spondylosis, painful scoliosis, or spinal stenosis), (iii) a musculoskeletal disorder (e.g. fibrosis, scarring, infectious intermittent joint effusion, spondylarthritis, plantar fasciitis, degenerative polyarthritis, hemophilic arthropathy, inflammatory myopathy with abundant macrophages, or polymyositis), and/or any combinations thereof.

### EEE. MMP12

[0729] In some embodiments, the disclosure provides one or more pharmaceutical compositions targeting an MMP12 gene, the composition comprising a plurality of LNPs, wherein the LNPs comprise an RNA-guided nuclease or a nucleic acid encoding an RNA-guided nuclease and at least one guide RNA or a nucleic acid encoding at least one guide RNA targeting an MMP12 gene, and an LNP system selected from any one of LNP001 to LNP240. In some embodiments, the at least one guide RNA has a crRNA sequence selected from SEQ ID NOs: 1498-1541. In some embodiments, the LNP system comprises the steroid component in a molar ratio from about 36 to about 46, or from about 38 to about 42. In some embodiments, the LNP system comprises the steroid component in a molar ratio of about 37, about 38, about 39, about 40, about 41, or about 42. In some embodiments, the steroid component comprises cholesterol. In some embodiments, the steroid component comprises cholesterol and one or more additional steroids, wherein cholesterol is about 60% (w/w) or more, about 65% (w/w) or more, about 70% (w/w) or more, about 75% (w/w) or more, or about 80% (w/w) or more of the steroid component. In some embodiments, the steroid component comprises dexamethasone. In some embodiments, the steroid component comprises a modified cholesterol, e.g., a hydroxy- or alkyl modification. In some embodiments, the steroid component comprises any other steroid disclosed herein. In some embodiments, the LNP system comprises the PEGylated Lipid Component in a molar ratio from about 1.5 to about 2.5. In some embodiments, the PEGylated Lipid Component comprises a PEG2000 lipid. In some embodiments, the PEGylated Lipid Component comprises one or more of DMG-PEG and/or DMG-C-PEG. In some embodiments, the PEGylated Lipid Component comprises one or more of DMG-PEG2000, DMG-C-PEG2000, DSG-PEG2000, C14-PEG2000, C16-PEG2000, and/or C18-PEG2000. In some embodiments, the plurality of LNPs have an average diameter between about 60 nm and about 120 nm. In some embodiments, the concentration of LNPs in the pharmaceutical composition is between 0.001 and 3 mg/ml. In some embodiments, the pharmaceutical composition targeting an MMP12 gene is formulated for treating one or more disorders selected from (i) a joint disease or illness (e.g., arthritis, post-traumatic arthritis, osteoarthritis, rheumatoid arthritis, psoriatic arthritis, lupus, ankylosing spondylitis, reactive arthritis, septic arthritis, juvenile idiopathic arthritis, fibromyalgia, crystal arthropathies, gout, pseudogout, or CPPD disease/chondrocalcinosis), (ii) a spinal condition or disorder (e.g. discogenic disease, low back pain, neck pain, lumbar pain, degenerative disc disease, annual ligament tear, herniated disc, spinal facet joint arthritis, intervertebral disc disease, spondylosis, painful scoliosis, or spinal stenosis), (iii) a musculoskeletal disorder (e.g. fibrosis, scarring, infectious intermittent joint effusion, spondylarthritis, plantar fasciitis, degenerative polyarthritis, hemophilic arthropathy, inflammatory myopathy with abundant macrophages, or polymyositis), and/or any combinations thereof.

### FFF. MMP13

[0730] In some embodiments, the disclosure provides one or more pharmaceutical compositions targeting an MMP13 gene, the composition comprising a plurality of LNPs, wherein the LNPs comprise an RNA-guided nuclease or a nucleic acid encoding an RNA-guided nuclease and at least one guide RNA or a nucleic acid encoding at least one guide RNA targeting an MMP13 gene, and an LNP system selected from any one of LNP001 to LNP240. In some embodiments, the at least one guide RNA has a crRNA sequence selected from SEQ ID NOs: 1542-1568. In some embodiments, the LNP system comprises the steroid component in a molar ratio from about 36 to about 46, or from about 38 to about 42. In some embodiments, the LNP system comprises the steroid component in a molar ratio of about 37, about 38, about 39, about 40, about 41, or about 42. In some embodiments, the steroid component comprises cholesterol. In some embodiments, the steroid component comprises cholesterol and one or more additional steroids, wherein cholesterol is about 60% (w/w) or more, about 65% (w/w) or more, about 70% (w/w) or more, about 75% (w/w) or more, or about 80% (w/w) or more of the steroid component. In some embodiments, the steroid component comprises dexamethasone. In some embodiments, the steroid component comprises a modified cholesterol, e.g., a hydroxy- or alkyl modification. In some embodiments, the steroid component comprises any other steroid disclosed herein. In some embodiments, the LNP system comprises the PEGylated Lipid Component in a molar ratio from about 1.5 to about 2.5. In some embodiments, the PEGylated Lipid Component comprises a PEG2000 lipid. In some embodiments, the PEGylated Lipid Component comprises one or more of DMG-PEG and/or DMG-C-PEG. In some embodiments, the PEGylated Lipid Component comprises one or more of DMG-PEG2000, DMG-C-PEG2000, DSG-PEG2000, C14-PEG2000, C16-PEG2000, and/or C18-PEG2000. In some embodiments, the plurality of LNPs have an average diameter between about 60 nm and about 120 nm. In some embodiments, the concentration of LNPs in the pharmaceutical composition is between 0.001 and 3 mg/ml. In some embodiments, the pharmaceutical composition targeting an MMP13 gene is formulated for treating one or more disorders selected from (i) a joint disease or illness (e.g., arthritis, post-traumatic arthritis, osteoarthritis, rheumatoid arthritis, psoriatic arthritis, lupus, ankylosing spondylitis, reactive arthritis, septic arthritis, juvenile idiopathic arthritis, fibromyalgia, crystal arthropathies, gout, pseudogout, or CPPD disease/chondrocalcinosis), (ii) a spinal condition or disorder (e.g. discogenic disease, low back pain, neck pain, lumbar pain, degenerative disc disease, annual ligament tear, herniated disc, spinal facet joint arthritis, intervertebral disc disease, spondylosis, painful scoliosis, or spinal stenosis), (iii) a musculoskeletal disorder (e.g. fibrosis, scarring, infectious intermittent joint effusion, spondylarthritis, plantar fasciitis, degenerative polyarthritis, hemophilic arthropathy, inflammatory myopathy with abundant macrophages, or polymyositis), and/or any combinations thereof.

### GGG. MRGPRX2

[0731] In some embodiments, the disclosure provides one or more pharmaceutical compositions targeting an MRGPRX2 gene, the composition comprising a plurality of LNPs, wherein the LNPs comprise an RNA-guided nuclease or a nucleic acid encoding an RNA-guided nuclease and at least one guide RNA or a nucleic acid encoding at least one guide RNA targeting an MRGPRX2 gene, and an LNP system selected from any one of LNP001 to LNP240. In some embodiments, the at least one guide RNA has a crRNA sequence selected from SEQ ID NOs: 1569-1585. In some embodiments, the LNP system comprises the steroid component in a molar ratio from about 36 to about 46, or from about 38 to about 42. In some embodiments, the LNP system comprises the steroid component in a molar ratio of about 37, about 38, about 39, about 40, about 41, or about 42. In some embodiments, the steroid component comprises cholesterol. In some embodiments, the steroid component comprises cholesterol and one or more additional steroids, wherein cholesterol is about 60% (w/w) or more, about 65% (w/w) or more, about 70% (w/w) or more, about 75% (w/w) or more, or about 80% (w/w) or more of the steroid component. In some embodiments, the steroid component comprises dexamethasone. In some embodiments, the steroid component comprises a modified cholesterol, e.g., a hydroxy- or alkyl modification. In some embodiments, the steroid component comprises any other steroid disclosed herein. In some embodiments, the LNP system comprises the PEGylated Lipid Component in a molar ratio from about 1.5 to about 2.5. In some embodiments, the PEGylated Lipid Component comprises a PEG2000 lipid. In some embodiments, the PEGylated Lipid Component comprises one or more of DMG-PEG and/or DMG-C-PEG. In some embodiments, the PEGylated Lipid Component comprises one or more of DMG-PEG2000, DMG-C-PEG2000, DSG-PEG2000, C14-PEG2000, C16-PEG2000, and/or C18-PEG2000. In some embodiments, the plurality of LNPs have an average diameter between about 60 nm and about 120 nm. In some embodiments, the concentration of LNPs in the pharmaceutical composition is between 0.001 and 3 mg/ml. In some embodiments, the pharmaceutical composition targeting an MRGPRX2 gene is formulated for treating one or more disorders selected from (i) a joint disease or illness (e.g., arthritis, post-traumatic arthritis, osteoarthritis, rheumatoid arthritis, psoriatic arthritis, lupus, ankylosing spondylitis, reactive arthritis, septic arthritis, juvenile idiopathic arthritis, fibromyalgia, crystal arthropathies, gout, pseudogout, or CPPD disease/chondrocalcinosis), (ii) a spinal condition or disorder (e.g. discogenic disease, low back pain, neck pain, lumbar pain, degenerative disc disease, annual ligament tear, herniated disc, spinal facet joint arthritis, intervertebral disc disease, spondylosis, painful scoliosis, or spinal stenosis), (iii) a musculoskeletal disorder (e.g. fibrosis, scarring, infectious intermittent joint effusion, spondylarthritis, plantar fasciitis, degenerative polyarthritis, hemophilic arthropathy, inflammatory myopathy with abundant macrophages, or polymyositis), and/or any combinations thereof.

### HHH. NGF

[0732] In some embodiments, the disclosure provides one or more pharmaceutical compositions targeting an NGF gene, the composition comprising a plurality of LNPs, wherein the LNPs comprise an RNA-guided nuclease or a nucleic acid encoding an RNA-guided nuclease and at least one guide RNA or a nucleic acid encoding at least one guide RNA targeting an NGF gene, and an LNP system selected from any one of LNP001 to LNP240. In some embodiments, the at least one guide RNA has a crRNA sequence selected from SEQ ID NOs: 1586-1628. In some embodiments, the LNP system comprises the steroid component in a molar ratio from about 36 to about 46, or from about 38 to about 42. In some embodiments, the LNP system comprises the steroid component in a molar ratio of about 37, about 38, about 39, about 40, about 41, or about 42. In some embodiments, the steroid component comprises cholesterol. In some embodiments, the steroid component comprises cholesterol and one or more additional steroids, wherein cholesterol is about 60% (w/w) or more, about 65% (w/w) or more, about 70% (w/w) or more, about 75% (w/w) or more, or about 80% (w/w) or more of the steroid component. In some embodiments, the steroid component comprises dexamethasone. In some embodiments, the steroid component comprises a modified cholesterol, e.g., a hydroxy- or alkyl modification. In some embodiments, the steroid component comprises any other steroid disclosed herein. In some embodiments, the LNP system comprises the PEGylated Lipid Component in a molar ratio from about 1.5 to about 2.5. In some embodiments, the PEGylated Lipid Component comprises a PEG2000 lipid. In some embodiments, the PEGylated Lipid Component comprises one or more of DMG-PEG and/or DMG-C-PEG. In some embodiments, the PEGylated Lipid Component comprises one or more of DMG-PEG2000, DMG-C-PEG2000, DSG-PEG2000, C14-PEG2000, C16-PEG2000, and/or C18-PEG2000. In some embodiments, the plurality of LNPs have an average diameter between about 60 nm and about 120 nm. In some embodiments, the concentration of LNPs in the pharmaceutical composition is between 0.001 and 3 mg/ml. In some embodiments, the pharmaceutical composition targeting an NGF gene is formulated for treating one or more disorders selected from (i) a joint disease or illness (e.g., arthritis, post-traumatic arthritis, osteoarthritis, rheumatoid arthritis, psoriatic arthritis, lupus, ankylosing spondylitis, reactive arthritis, septic arthritis, juvenile idiopathic arthritis, fibromyalgia, crystal arthropathies, gout, pseudogout, or CPPD disease/chondrocalcinosis), (ii) a spinal condition or disorder (e.g. discogenic disease, low back pain, neck pain, lumbar pain, degenerative disc disease, annual ligament tear, herniated disc, spinal facet joint arthritis, intervertebral disc disease, spondylosis, painful scoliosis, or spinal stenosis), (iii) a musculoskeletal disorder (e.g. fibrosis, scarring, infectious intermittent joint effusion, spondylarthritis, plantar fasciitis, degenerative polyarthritis, hemophilic arthropathy, inflammatory myopathy with abundant macrophages, or polymyositis), and/or any combinations thereof.

### III. NGFR

[0733] In some embodiments, the disclosure provides one or more pharmaceutical compositions targeting an NGFR gene, the composition comprising a plurality of LNPs, wherein the LNPs comprise an RNA-guided nuclease or a nucleic acid encoding an RNA-guided nuclease and at least one guide RNA or a nucleic acid encoding at least one guide RNA targeting an NGFR gene, and an LNP system selected from any one of LNP001 to LNP240. In some embodiments, the at least one guide RNA has a crRNA sequence selected from SEQ ID NOs: 1629-1676. In some embodiments, the LNP system comprises the steroid component in a molar ratio from about 36 to about 46, or from about 38 to about 42. In some embodiments, the LNP system comprises the steroid component in a molar ratio of about 37, about 38, about 39, about 40, about 41, or about 42. In some embodiments, the steroid component comprises cholesterol. In some embodiments, the steroid component comprises cholesterol and one or more additional steroids, wherein cholesterol is about 60% (w/w) or more, about 65% (w/w) or more, about 70% (w/w) or more, about 75% (w/w) or more, or about 80% (w/w) or more of the steroid component. In some embodiments, the steroid component comprises dexamethasone. In some embodiments, the steroid component comprises a modified cholesterol, e.g., a hydroxy- or alkyl modification. In some embodiments, the steroid component comprises any other steroid disclosed herein. In some embodiments, the LNP system comprises the PEGylated Lipid Component in a molar ratio from about 1.5 to about 2.5. In some embodiments, the PEGylated Lipid Component comprises a PEG2000 lipid. In some embodiments, the PEGylated Lipid Component comprises one or more of DMG-PEG and/or DMG-C-PEG. In some embodiments, the PEGylated Lipid Component comprises one or more of DMG-PEG2000, DMG-C-PEG2000, DSG-PEG2000, C14-PEG2000, C16-PEG2000, and/or C18-PEG2000. In some embodiments, the plurality of LNPs have an average diameter between about 60 nm and about 120 nm. In some embodiments, the concentration of LNPs in the pharmaceutical composition is between 0.001 and 3 mg/ml. In some embodiments, the pharmaceutical composition targeting an NGFR gene is formulated for treating one or more disorders selected from (i) a joint disease or illness (e.g., arthritis, post-traumatic arthritis, osteoarthritis, rheumatoid arthritis, psoriatic arthritis, lupus, ankylosing spondylitis, reactive arthritis, septic arthritis, juvenile idiopathic arthritis, fibromyalgia, crystal arthropathies, gout, pseudogout, or CPPD disease/chondrocalcinosis), (ii) a spinal condition or disorder (e.g. discogenic disease, low back pain, neck pain, lumbar pain, degenerative disc disease, annual ligament tear, herniated disc, spinal facet joint arthritis, intervertebral disc disease, spondylosis, painful scoliosis, or spinal stenosis), (iii) a musculoskeletal disorder (e.g. fibrosis, scarring, infectious intermittent joint effusion, spondylarthritis, plantar fasciitis, degenerative polyarthritis, hemophilic arthropathy, inflammatory myopathy with abundant macrophages, or polymyositis), and/or any combinations thereof.

### JJJ. NTF3

[0734] In some embodiments, the disclosure provides one or more pharmaceutical compositions targeting an NTF3 gene, the composition comprising a plurality of LNPs, wherein the LNPs comprise an RNA-guided nuclease or a nucleic acid encoding an RNA-guided nuclease and at least one guide RNA or a nucleic acid encoding at least one guide RNA targeting an NTF3 gene, and an LNP system selected from any one of LNP001 to LNP240. In some embodiments, the at least one guide RNA has a crRNA sequence selected from SEQ ID NOs: 1677-1724. In some embodiments, the LNP system comprises the steroid component in a molar ratio from about 36 to about 46, or from about 38 to about 42. In some embodiments, the LNP system comprises the steroid component in a molar ratio of about 37, about 38, about 39, about 40, about 41, or about 42. In some embodiments, the steroid component comprises cholesterol. In some embodiments, the steroid component comprises cholesterol and one or more additional steroids, wherein cholesterol is about 60% (w/w) or more, about 65% (w/w) or more, about 70% (w/w) or more, about 75% (w/w) or more, or about 80% (w/w) or more of the steroid component. In some embodiments, the steroid component comprises dexamethasone. In some embodiments, the steroid component comprises a modified cholesterol, e.g., a hydroxy- or alkyl modification. In some embodiments, the steroid component comprises any other steroid disclosed herein. In some embodiments, the LNP system comprises the PEGylated Lipid Component in a molar ratio from about 1.5 to about 2.5. In some embodiments, the PEGylated Lipid Component comprises a PEG2000 lipid. In some embodiments, the PEGylated Lipid Component comprises one or more of DMG-PEG and/or DMG-C-PEG. In some embodiments, the PEGylated Lipid Component comprises one or more of DMG-PEG2000, DMG-C-PEG2000, DSG-PEG2000, C14-PEG2000, C16-PEG2000, and/or C18-PEG2000. In some embodiments, the plurality of LNPs have an average diameter between about 60 nm and about 120 nm. In some embodiments, the concentration of LNPs in the pharmaceutical composition is between 0.001 and 3 mg/ml. In some embodiments, the pharmaceutical composition targeting an NTF3 gene is formulated for treating one or more disorders selected from (i) a joint disease or illness (e.g., arthritis, post-traumatic arthritis, osteoarthritis, rheumatoid arthritis, psoriatic arthritis, lupus, ankylosing spondylitis, reactive arthritis, septic arthritis, juvenile idiopathic arthritis, fibromyalgia, crystal arthropathies, gout, pseudogout, or CPPD disease/chondrocalcinosis), (ii) a spinal condition or disorder (e.g. discogenic disease, low back pain, neck pain, lumbar pain, degenerative disc disease, annual ligament tear, herniated disc, spinal facet joint arthritis, intervertebral disc disease, spondylosis, painful scoliosis, or spinal stenosis), (iii) a musculoskeletal disorder (e.g. fibrosis, scarring, infectious intermittent joint effusion, spondylarthritis, plantar fasciitis, degenerative polyarthritis, hemophilic arthropathy, inflammatory myopathy with abundant macrophages, or polymyositis), and/or any combinations thereof.

### KKK. NTF4

[0735] In some embodiments, the disclosure provides one or more pharmaceutical compositions targeting an NTF4 gene, the composition comprising a plurality of LNPs, wherein the LNPs comprise an RNA-guided nuclease or a nucleic acid encoding an RNA-guided nuclease and at least one guide RNA or a nucleic acid encoding at least one guide RNA targeting an NTF4 gene, and an LNP system selected from any one of LNP001 to LNP240. In some embodiments, the at least one guide RNA has a crRNA sequence selected from SEQ ID NOs: 1725-1746. In some embodiments, the LNP system comprises the steroid component in a molar ratio from about 36 to about 46, or from about 38 to about 42. In some embodiments, the LNP system comprises the steroid component in a molar ratio of about 37, about 38, about 39, about 40, about 41, or about 42. In some embodiments, the steroid component comprises cholesterol. In some embodiments, the steroid component comprises cholesterol and one or more additional steroids, wherein cholesterol is about 60% (w/w) or more, about 65% (w/w) or more, about 70% (w/w) or more, about 75% (w/w) or more, or about 80% (w/w) or more of the steroid component. In some embodiments, the steroid component comprises dexamethasone. In some embodiments, the steroid component comprises a modified cholesterol, e.g., a hydroxy- or alkyl modification. In some embodiments, the steroid component comprises any other steroid disclosed herein. In some embodiments, the LNP system comprises the PEGylated Lipid Component in a molar ratio from about 1.5 to about 2.5. In some embodiments, the PEGylated Lipid Component comprises a PEG2000 lipid. In some embodiments, the PEGylated Lipid Component comprises one or more of DMG-PEG and/or DMG-C-PEG. In some embodiments, the PEGylated Lipid Component comprises one or more of DMG-PEG2000, DMG-C-PEG2000, DSG-PEG2000, C14-PEG2000, C16-PEG2000, and/or C18-PEG2000. In some embodiments, the plurality of LNPs have an average diameter between about 60 nm and about 120 nm. In some embodiments, the concentration of LNPs in the pharmaceutical composition is between 0.001 and 3 mg/ml. In some embodiments, the pharmaceutical composition targeting an NTF4 gene is formulated for treating one or more disorders selected from (i) a joint disease or illness (e.g., arthritis, post-traumatic arthritis, osteoarthritis, rheumatoid arthritis, psoriatic arthritis, lupus, ankylosing spondylitis, reactive arthritis, septic arthritis, juvenile idiopathic arthritis, fibromyalgia, crystal arthropathies, gout, pseudogout, or CPPD disease/chondrocalcinosis), (ii) a spinal condition or disorder (e.g. discogenic disease, low back pain, neck pain, lumbar pain, degenerative disc disease, annual ligament tear, herniated disc, spinal facet joint arthritis, intervertebral disc disease, spondylosis, painful scoliosis, or spinal stenosis), (iii) a musculoskeletal disorder (e.g. fibrosis, scarring, infectious intermittent joint effusion, spondylarthritis, plantar fasciitis, degenerative polyarthritis, hemophilic arthropathy, inflammatory myopathy with abundant macrophages, or polymyositis), and/or any combinations thereof.

### LLL. NTRK1

[0736] In some embodiments, the disclosure provides one or more pharmaceutical compositions targeting an NTRK1 gene, the composition comprising a plurality of LNPs, wherein the LNPs comprise an RNA-guided nuclease or a nucleic acid encoding an RNA-guided nuclease and at least one guide RNA or a nucleic acid encoding at least one guide RNA targeting an NTRK1 gene, and an LNP system selected from any one of LNP001 to LNP240. In some embodiments, the at least one guide RNA has a crRNA sequence selected from SEQ ID NOs: 1747-1794. In some embodiments, the LNP system comprises the steroid component in a molar ratio from about 36 to about 46, or from about 38 to about 42. In some embodiments, the LNP system comprises the steroid component in a molar ratio of about 37, about 38, about 39, about 40, about 41, or about 42. In some embodiments, the steroid component comprises cholesterol. In some embodiments, the steroid component comprises cholesterol and one or more additional steroids, wherein cholesterol is about 60% (w/w) or more, about 65% (w/w) or more, about 70% (w/w) or more, about 75% (w/w) or more, or about 80% (w/w) or more of the steroid component. In some embodiments, the steroid component comprises dexamethasone. In some embodiments, the steroid component comprises a modified cholesterol, e.g., a hydroxy- or alkyl modification. In some embodiments, the steroid component comprises any other steroid disclosed herein. In some embodiments, the LNP system comprises the PEGylated Lipid Component in a molar ratio from about 1.5 to about 2.5. In some embodiments, the PEGylated Lipid Component comprises a PEG2000 lipid. In some embodiments, the PEGylated Lipid Component comprises one or more of DMG-PEG and/or DMG-C-PEG. In some embodiments, the PEGylated Lipid Component comprises one or more of DMG-PEG2000, DMG-C-PEG2000, DSG-PEG2000, C14-PEG2000, C16-PEG2000, and/or C18-PEG2000. In some embodiments, the plurality of LNPs have an average diameter between about 60 nm and about 120 nm. In some embodiments, the concentration of LNPs in the pharmaceutical composition is between 0.001 and 3 mg/ml. In some embodiments, the pharmaceutical composition targeting an NTRK1 gene is formulated for treating one or more disorders selected from (i) a joint disease or illness (e.g., arthritis, post-traumatic arthritis, osteoarthritis, rheumatoid arthritis, psoriatic arthritis, lupus, ankylosing spondylitis, reactive arthritis, septic arthritis, juvenile idiopathic arthritis, fibromyalgia, crystal arthropathies, gout, pseudogout, or CPPD disease/chondrocalcinosis), (ii) a spinal condition or disorder (e.g. discogenic disease, low back pain, neck pain, lumbar pain, degenerative disc disease, annual ligament tear, herniated disc, spinal facet joint arthritis, intervertebral disc disease, spondylosis, painful scoliosis, or spinal stenosis), (iii) a musculoskeletal disorder (e.g. fibrosis, scarring, infectious intermittent joint effusion, spondylarthritis, plantar fasciitis, degenerative polyarthritis, hemophilic arthropathy, inflammatory myopathy with abundant macrophages, or polymyositis), and/or any combinations thereof.

### MMM. NTRK2

[0737] In some embodiments, the disclosure provides one or more pharmaceutical compositions targeting an NTRK2 gene, the composition comprising a plurality of LNPs, wherein the LNPs comprise an RNA-guided nuclease or a nucleic acid encoding an RNA-guided nuclease and at least one guide RNA or a nucleic acid encoding at least one guide RNA targeting an NTRK2 gene, and an LNP system selected from any one of LNP001 to LNP240. In some embodiments, the at least one guide RNA has a crRNA sequence selected from SEQ ID NOs: 1795-1842. In some embodiments, the LNP system comprises the steroid component in a molar ratio from about 36 to about 46, or from about 38 to about 42. In some embodiments, the LNP system comprises the steroid component in a molar ratio of about 37, about 38, about 39, about 40, about 41, or about 42. In some embodiments, the steroid component comprises cholesterol. In some embodiments, the steroid component comprises cholesterol and one or more additional steroids, wherein cholesterol is about 60% (w/w) or more, about 65% (w/w) or more, about 70% (w/w) or more, about 75% (w/w) or more, or about 80% (w/w) or more of the steroid component. In some embodiments, the steroid component comprises dexamethasone. In some embodiments, the steroid component comprises a modified cholesterol, e.g., a hydroxy- or alkyl modification. In some embodiments, the steroid component comprises any other steroid disclosed herein. In some embodiments, the LNP system comprises the PEGylated Lipid Component in a molar ratio from about 1.5 to about 2.5. In some embodiments, the PEGylated Lipid Component comprises a PEG2000 lipid. In some embodiments, the PEGylated Lipid Component comprises one or more of DMG-PEG and/or DMG-C-PEG. In some embodiments, the PEGylated Lipid Component comprises one or more of DMG-PEG2000, DMG-C-PEG2000, DSG-PEG2000, C14-PEG2000, C16-PEG2000, and/or C18-PEG2000. In some embodiments, the plurality of LNPs have an average diameter between about 60 nm and about 120 nm. In some embodiments, the concentration of LNPs in the pharmaceutical composition is between 0.001 and 3 mg/ml. In some embodiments, the pharmaceutical composition targeting an NTRK2 gene is formulated for treating one or more disorders selected from (i) a joint disease or illness (e.g., arthritis, post-traumatic arthritis, osteoarthritis, rheumatoid arthritis, psoriatic arthritis, lupus, ankylosing spondylitis, reactive arthritis, septic arthritis, juvenile idiopathic arthritis, fibromyalgia, crystal arthropathies, gout, pseudogout, or CPPD disease/chondrocalcinosis), (ii) a spinal condition or disorder (e.g. discogenic disease, low back pain, neck pain, lumbar pain, degenerative disc disease, annual ligament tear, herniated disc, spinal facet joint arthritis, intervertebral disc disease, spondylosis, painful scoliosis, or spinal stenosis), (iii) a musculoskeletal disorder (e.g. fibrosis, scarring, infectious intermittent joint effusion, spondylarthritis, plantar fasciitis, degenerative polyarthritis, hemophilic arthropathy, inflammatory myopathy with abundant macrophages, or polymyositis), and/or any combinations thereof.

### NNN. RAMP1

[0738] In some embodiments, the disclosure provides one or more pharmaceutical compositions targeting an RAMP1 gene, the composition comprising a plurality of LNPs, wherein the LNPs comprise an RNA-guided nuclease or a nucleic acid encoding an RNA-guided nuclease and at least one guide RNA or a nucleic acid encoding at least one guide RNA targeting an RAMP1 gene, and an LNP system selected from any one of LNP001 to LNP240. In some embodiments, the at least one guide RNA has a crRNA sequence selected from SEQ ID NOs: 1843-1859. In some embodiments, the LNP system comprises the steroid component in a molar ratio from about 36 to about 46, or from about 38 to about 42. In some embodiments, the LNP system comprises the steroid component in a molar ratio of about 37, about 38, about 39, about 40, about 41, or about 42. In some embodiments, the steroid component comprises cholesterol. In some embodiments, the steroid component comprises cholesterol and one or more additional steroids, wherein cholesterol is about 60% (w/w) or more, about 65% (w/w) or more, about 70% (w/w) or more, about 75% (w/w) or more, or about 80% (w/w) or more of the steroid component. In some embodiments, the steroid component comprises dexamethasone. In some embodiments, the steroid component comprises a modified cholesterol, e.g., a hydroxy- or alkyl modification. In some embodiments, the steroid component comprises any other steroid disclosed herein. In some embodiments, the LNP system comprises the PEGylated Lipid Component in a molar ratio from about 1.5 to about 2.5. In some embodiments, the PEGylated Lipid Component comprises a PEG2000 lipid. In some embodiments, the PEGylated Lipid Component comprises one or more of DMG-PEG and/or DMG-C-PEG. In some embodiments, the PEGylated Lipid Component comprises one or more of DMG-PEG2000, DMG-C-PEG2000, DSG-PEG2000, C14-PEG2000, C16-PEG2000, and/or C18-PEG2000. In some embodiments, the plurality of LNPs have an average diameter between about 60 nm and about 120 nm. In some embodiments, the concentration of LNPs in the pharmaceutical composition is between 0.001 and 3 mg/ml. In some embodiments, the pharmaceutical composition targeting an RAMP1 gene is formulated for treating one or more disorders selected from (i) a joint disease or illness (e.g., arthritis, post-traumatic arthritis, osteoarthritis, rheumatoid arthritis, psoriatic arthritis, lupus, ankylosing spondylitis, reactive arthritis, septic arthritis, juvenile idiopathic arthritis, fibromyalgia, crystal arthropathies, gout, pseudogout, or CPPD disease/chondrocalcinosis), (ii) a spinal condition or disorder (e.g. discogenic disease, low back pain, neck pain, lumbar pain, degenerative disc disease, annual ligament tear, herniated disc, spinal facet joint arthritis, intervertebral disc disease, spondylosis, painful scoliosis, or spinal stenosis), (iii) a musculoskeletal disorder (e.g. fibrosis, scarring, infectious intermittent joint effusion, spondylarthritis, plantar fasciitis, degenerative polyarthritis, hemophilic arthropathy, inflammatory myopathy with abundant macrophages, or polymyositis), and/or any combinations thereof.

### OOO. SCN1A

[0739] In some embodiments, the disclosure provides one or more pharmaceutical compositions targeting an SCN1A gene, the composition comprising a plurality of LNPs, wherein the LNPs comprise an RNA-guided nuclease or a nucleic acid encoding an RNA-guided nuclease and at least one guide RNA or a nucleic acid encoding at least one guide RNA targeting an SCN1A gene, and an LNP system selected from any one of LNP001 to LNP240. In some embodiments, the at least one guide RNA has a crRNA sequence selected from SEQ ID NOs: 1860-1907. In some embodiments, the LNP system comprises the steroid component in a molar ratio from about 36 to about 46, or from about 38 to about 42. In some embodiments, the LNP system comprises the steroid component in a molar ratio of about 37, about 38, about 39, about 40, about 41, or about 42. In some embodiments, the steroid component comprises cholesterol. In some embodiments, the steroid component comprises cholesterol and one or more additional steroids, wherein cholesterol is about 60% (w/w) or more, about 65% (w/w) or more, about 70% (w/w) or more, about 75% (w/w) or more, or about 80% (w/w) or more of the steroid component. In some embodiments, the steroid component comprises dexamethasone. In some embodiments, the steroid component comprises a modified cholesterol, e.g., a hydroxy- or alkyl modification. In some embodiments, the steroid component comprises any other steroid disclosed herein. In some embodiments, the LNP system comprises the PEGylated Lipid Component in a molar ratio from about 1.5 to about 2.5. In some embodiments, the PEGylated Lipid Component comprises a PEG2000 lipid. In some embodiments, the PEGylated Lipid Component comprises one or more of DMG-PEG and/or DMG-C-PEG. In some embodiments, the PEGylated Lipid Component comprises one or more of DMG-PEG2000, DMG-C-PEG2000, DSG-PEG2000, C14-PEG2000, C16-PEG2000, and/or C18-PEG2000. In some embodiments, the plurality of LNPs have an average diameter between about 60 nm and about 120 nm. In some embodiments, the concentration of LNPs in the pharmaceutical composition is between 0.001 and 3 mg/ml. In some embodiments, the pharmaceutical composition targeting an SCN1A gene is formulated for treating one or more disorders selected from (i) a joint disease or illness (e.g., arthritis, post-traumatic arthritis, osteoarthritis, rheumatoid arthritis, psoriatic arthritis, lupus, ankylosing spondylitis, reactive arthritis, septic arthritis, juvenile idiopathic arthritis, fibromyalgia, crystal arthropathies, gout, pseudogout, or CPPD disease/chondrocalcinosis), (ii) a spinal condition or disorder (e.g. discogenic disease, low back pain, neck pain, lumbar pain, degenerative disc disease, annual ligament tear, herniated disc, spinal facet joint arthritis, intervertebral disc disease, spondylosis, painful scoliosis, or spinal stenosis), (iii) a musculoskeletal disorder (e.g. fibrosis, scarring, infectious intermittent joint effusion, spondylarthritis, plantar fasciitis, degenerative polyarthritis, hemophilic arthropathy, inflammatory myopathy with abundant macrophages, or polymyositis), and/or any combinations thereof.

### PPP. SCN2A

[0740] In some embodiments, the disclosure provides one or more pharmaceutical compositions targeting an SCN2A gene, the composition comprising a plurality of LNPs, wherein the LNPs comprise an RNA-guided nuclease or a nucleic acid encoding an RNA-guided nuclease and at least one guide RNA or a nucleic acid encoding at least one guide RNA targeting an SCN2A gene, and an LNP system selected from any one of LNP001 to LNP240. In some embodiments, the at least one guide RNA has a crRNA sequence selected from SEQ ID NOs: 1908-1955. In some embodiments, the LNP system comprises the steroid component in a molar ratio from about 36 to about 46, or from about 38 to about 42. In some embodiments, the LNP system comprises the steroid component in a molar ratio of about 37, about 38, about 39, about 40, about 41, or about 42. In some embodiments, the steroid component comprises cholesterol. In some embodiments, the steroid component comprises cholesterol and one or more additional steroids, wherein cholesterol is about 60% (w/w) or more, about 65% (w/w) or more, about 70% (w/w) or more, about 75% (w/w) or more, or about 80% (w/w) or more of the steroid component. In some embodiments, the steroid component comprises dexamethasone. In some embodiments, the steroid component comprises a modified cholesterol, e.g., a hydroxy- or alkyl modification. In some embodiments, the steroid component comprises any other steroid disclosed herein. In some embodiments, the LNP system comprises the PEGylated Lipid Component in a molar ratio from about 1.5 to about 2.5. In some embodiments, the PEGylated Lipid Component comprises a PEG2000 lipid. In some embodiments, the PEGylated Lipid Component comprises one or more of DMG-PEG and/or DMG-C-PEG. In some embodiments, the PEGylated Lipid Component comprises one or more of DMG-PEG2000, DMG-C-PEG2000, DSG-PEG2000, C14-PEG2000, C16-PEG2000, and/or C18-PEG2000. In some embodiments, the plurality of LNPs have an average diameter between about 60 nm and about 120 nm. In some embodiments, the concentration of LNPs in the pharmaceutical composition is between 0.001 and 3 mg/ml. In some embodiments, the pharmaceutical composition targeting an SCN2A gene is formulated for treating one or more disorders selected from (i) a joint disease or illness (e.g., arthritis, post-traumatic arthritis, osteoarthritis, rheumatoid arthritis, psoriatic arthritis, lupus, ankylosing spondylitis, reactive arthritis, septic arthritis, juvenile idiopathic arthritis, fibromyalgia, crystal arthropathies, gout, pseudogout, or CPPD disease/chondrocalcinosis), (ii) a spinal condition or disorder (e.g. discogenic disease, low back pain, neck pain, lumbar pain, degenerative disc disease, annual ligament tear, herniated disc, spinal facet joint arthritis, intervertebral disc disease, spondylosis, painful scoliosis, or spinal stenosis), (iii) a musculoskeletal disorder (e.g. fibrosis, scarring, infectious intermittent joint effusion, spondylarthritis, plantar fasciitis, degenerative polyarthritis, hemophilic arthropathy, inflammatory myopathy with abundant macrophages, or polymyositis), and/or any combinations thereof.

### QQQ. SCN3A

[0741] In some embodiments, the disclosure provides one or more pharmaceutical compositions targeting an SCN3A gene, the composition comprising a plurality of LNPs, wherein the LNPs comprise an RNA-guided nuclease or a nucleic acid encoding an RNA-guided nuclease and at least one guide RNA or a nucleic acid encoding at least one guide RNA targeting an SCN3A gene, and an LNP system selected from any one of LNP001 to LNP240. In some embodiments, the at least one guide RNA has a crRNA sequence selected from SEQ ID NOs: 1956-2003. In some embodiments, the LNP system comprises the steroid component in a molar ratio from about 36 to about 46, or from about 38 to about 42. In some embodiments, the LNP system comprises the steroid component in a molar ratio of about 37, about 38, about 39, about 40, about 41, or about 42. In some embodiments, the steroid component comprises cholesterol. In some embodiments, the steroid component comprises cholesterol and one or more additional steroids, wherein cholesterol is about 60% (w/w) or more, about 65% (w/w) or more, about 70% (w/w) or more, about 75% (w/w) or more, or about 80% (w/w) or more of the steroid component. In some embodiments, the steroid component comprises dexamethasone. In some embodiments, the steroid component comprises a modified cholesterol, e.g., a hydroxy- or alkyl modification. In some embodiments, the steroid component comprises any other steroid disclosed herein. In some embodiments, the LNP system comprises the PEGylated Lipid Component in a molar ratio from about 1.5 to about 2.5. In some embodiments, the PEGylated Lipid Component comprises a PEG2000 lipid. In some embodiments, the PEGylated Lipid Component comprises one or more of DMG-PEG and/or DMG-C-PEG. In some embodiments, the PEGylated Lipid Component comprises one or more of DMG-PEG2000, DMG-C-PEG2000, DSG-PEG2000, C14-PEG2000, C16-PEG2000, and/or C18-PEG2000. In some embodiments, the plurality of LNPs have an average diameter between about 60 nm and about 120 nm. In some embodiments, the concentration of LNPs in the pharmaceutical composition is between 0.001 and 3 mg/ml. In some embodiments, the pharmaceutical composition targeting an SCN3A gene is formulated for treating one or more disorders selected from (i) a joint disease or illness (e.g., arthritis, post-traumatic arthritis, osteoarthritis, rheumatoid arthritis, psoriatic arthritis, lupus, ankylosing spondylitis, reactive arthritis, septic arthritis, juvenile idiopathic arthritis, fibromyalgia, crystal arthropathies, gout, pseudogout, or CPPD disease/chondrocalcinosis), (ii) a spinal condition or disorder (e.g. discogenic disease, low back pain, neck pain, lumbar pain, degenerative disc disease, annual ligament tear, herniated disc, spinal facet joint arthritis, intervertebral disc disease, spondylosis, painful scoliosis, or spinal stenosis), (iii) a musculoskeletal disorder (e.g. fibrosis, scarring, infectious intermittent joint effusion, spondylarthritis, plantar fasciitis, degenerative polyarthritis, hemophilic arthropathy, inflammatory myopathy with abundant macrophages, or polymyositis), and/or any combinations thereof.

### RRR. SCN4A

[0742] In some embodiments, the disclosure provides one or more pharmaceutical compositions targeting an SCN4A gene, the composition comprising a plurality of LNPs, wherein the LNPs comprise an RNA-guided nuclease or a nucleic acid encoding an RNA-guided nuclease and at least one guide RNA or a nucleic acid encoding at least one guide RNA targeting an SCN4A gene, and an LNP system selected from any one of LNP001 to LNP240. In some embodiments, the at least one guide RNA has a crRNA sequence selected from SEQ ID NOs: 2004-2051. In some embodiments, the LNP system comprises the steroid component in a molar ratio from about 36 to about 46, or from about 38 to about 42. In some embodiments, the LNP system comprises the steroid component in a molar ratio of about 37, about 38, about 39, about 40, about 41, or about 42. In some embodiments, the steroid component comprises cholesterol. In some embodiments, the steroid component comprises cholesterol and one or more additional steroids, wherein cholesterol is about 60% (w/w) or more, about 65% (w/w) or more, about 70% (w/w) or more, about 75% (w/w) or more, or about 80% (w/w) or more of the steroid component. In some embodiments, the steroid component comprises dexamethasone. In some embodiments, the steroid component comprises a modified cholesterol, e.g., a hydroxy- or alkyl modification. In some embodiments, the steroid component comprises any other steroid disclosed herein. In some embodiments, the LNP system comprises the PEGylated Lipid Component in a molar ratio from about 1.5 to about 2.5. In some embodiments, the PEGylated Lipid Component comprises a PEG2000 lipid. In some embodiments, the PEGylated Lipid Component comprises one or more of DMG-PEG and/or DMG-C-PEG. In some embodiments, the PEGylated Lipid Component comprises one or more of DMG-PEG2000, DMG-C-PEG2000, DSG-PEG2000, C14-PEG2000, C16-PEG2000, and/or C18-PEG2000. In some embodiments, the plurality of LNPs have an average diameter between about 60 nm and about 120 nm. In some embodiments, the concentration of LNPs in the pharmaceutical composition is between 0.001 and 3 mg/ml. In some embodiments, the pharmaceutical composition targeting an SCN4A gene is formulated for treating one or more disorders selected from (i) a joint disease or illness (e.g., arthritis, post-traumatic arthritis, osteoarthritis, rheumatoid arthritis, psoriatic arthritis, lupus, ankylosing spondylitis, reactive arthritis, septic arthritis, juvenile idiopathic arthritis, fibromyalgia, crystal arthropathies, gout, pseudogout, or CPPD disease/chondrocalcinosis), (ii) a spinal condition or disorder (e.g. discogenic disease, low back pain, neck pain, lumbar pain, degenerative disc disease, annual ligament tear, herniated disc, spinal facet joint arthritis, intervertebral disc disease, spondylosis, painful scoliosis, or spinal stenosis), (iii) a musculoskeletal disorder (e.g. fibrosis, scarring, infectious intermittent joint effusion, spondylarthritis, plantar fasciitis, degenerative polyarthritis, hemophilic arthropathy, inflammatory myopathy with abundant macrophages, or polymyositis), and/or any combinations thereof.

### SSS. SCN5A

[0743] In some embodiments, the disclosure provides one or more pharmaceutical compositions targeting an SCN5A gene, the composition comprising a plurality of LNPs, wherein the LNPs comprise an RNA-guided nuclease or a nucleic acid encoding an RNA-guided nuclease and at least one guide RNA or a nucleic acid encoding at least one guide RNA targeting an SCN5A gene, and an LNP system selected from any one of LNP001 to LNP240. In some embodiments, the at least one guide RNA has a crRNA sequence selected from SEQ ID NOs: 2052-2099. In some embodiments, the LNP system comprises the steroid component in a molar ratio from about 36 to about 46, or from about 38 to about 42. In some embodiments, the LNP system comprises the steroid component in a molar ratio of about 37, about 38, about 39, about 40, about 41, or about 42. In some embodiments, the steroid component comprises cholesterol. In some embodiments, the steroid component comprises cholesterol and one or more additional steroids, wherein cholesterol is about 60% (w/w) or more, about 65% (w/w) or more, about 70% (w/w) or more, about 75% (w/w) or more, or about 80% (w/w) or more of the steroid component. In some embodiments, the steroid component comprises dexamethasone. In some embodiments, the steroid component comprises a modified cholesterol, e.g., a hydroxy- or alkyl modification. In some embodiments, the steroid component comprises any other steroid disclosed herein. In some embodiments, the LNP system comprises the PEGylated Lipid Component in a molar ratio from about 1.5 to about 2.5. In some embodiments, the PEGylated Lipid Component comprises a PEG2000 lipid. In some embodiments, the PEGylated Lipid Component comprises one or more of DMG-PEG and/or DMG-C-PEG. In some embodiments, the PEGylated Lipid Component comprises one or more of DMG-PEG2000, DMG-C-PEG2000, DSG-PEG2000, C14-PEG2000, C16-PEG2000, and/or C18-PEG2000. In some embodiments, the plurality of LNPs have an average diameter between about 60 nm and about 120 nm. In some embodiments, the concentration of LNPs in the pharmaceutical composition is between 0.001 and 3 mg/ml. In some embodiments, the pharmaceutical composition targeting an SCN5A gene is formulated for treating one or more disorders selected from (i) a joint disease or illness (e.g., arthritis, post-traumatic arthritis, osteoarthritis, rheumatoid arthritis, psoriatic arthritis, lupus, ankylosing spondylitis, reactive arthritis, septic arthritis, juvenile idiopathic arthritis, fibromyalgia, crystal arthropathies, gout, pseudogout, or CPPD disease/chondrocalcinosis), (ii) a spinal condition or disorder (e.g. discogenic disease, low back pain, neck pain, lumbar pain, degenerative disc disease, annual ligament tear, herniated disc, spinal facet joint arthritis, intervertebral disc disease, spondylosis, painful scoliosis, or spinal stenosis), (iii) a musculoskeletal disorder (e.g. fibrosis, scarring, infectious intermittent joint effusion, spondylarthritis, plantar fasciitis, degenerative polyarthritis, hemophilic arthropathy, inflammatory myopathy with abundant macrophages, or polymyositis), and/or any combinations thereof.

### TTT. SCN8A

[0744] In some embodiments, the disclosure provides one or more pharmaceutical compositions targeting an SCN8A gene, the composition comprising a plurality of LNPs, wherein the LNPs comprise an RNA-guided nuclease or a nucleic acid encoding an RNA-guided nuclease and at least one guide RNA or a nucleic acid encoding at least one guide RNA targeting an SCN8A gene, and an LNP system selected from any one of LNP001 to LNP240. In some embodiments, the at least one guide RNA has a crRNA sequence selected from SEQ ID NOs: 2100-2147. In some embodiments, the LNP system comprises the steroid component in a molar ratio from about 36 to about 46, or from about 38 to about 42. In some embodiments, the LNP system comprises the steroid component in a molar ratio of about 37, about 38, about 39, about 40, about 41, or about 42. In some embodiments, the steroid component comprises cholesterol. In some embodiments, the steroid component comprises cholesterol and one or more additional steroids, wherein cholesterol is about 60% (w/w) or more, about 65% (w/w) or more, about 70% (w/w) or more, about 75% (w/w) or more, or about 80% (w/w) or more of the steroid component. In some embodiments, the steroid component comprises dexamethasone. In some embodiments, the steroid component comprises a modified cholesterol, e.g., a hydroxy- or alkyl modification. In some embodiments, the steroid component comprises any other steroid disclosed herein. In some embodiments, the LNP system comprises the PEGylated Lipid Component in a molar ratio from about 1.5 to about 2.5. In some embodiments, the PEGylated Lipid Component comprises a PEG2000 lipid. In some embodiments, the PEGylated Lipid Component comprises one or more of DMG-PEG and/or DMG-C-PEG. In some embodiments, the PEGylated Lipid Component comprises one or more of DMG-PEG2000, DMG-C-PEG2000, DSG-PEG2000, C14-PEG2000, C16-PEG2000, and/or C18-PEG2000. In some embodiments, the plurality of LNPs have an average diameter between about 60 nm and about 120 nm. In some embodiments, the concentration of LNPs in the pharmaceutical composition is between 0.001 and 3 mg/ml. In some embodiments, the pharmaceutical composition targeting an SCN8A gene is formulated for treating one or more disorders selected from (i) a joint disease or illness (e.g., arthritis, post-traumatic arthritis, osteoarthritis, rheumatoid arthritis, psoriatic arthritis, lupus, ankylosing spondylitis, reactive arthritis, septic arthritis, juvenile idiopathic arthritis, fibromyalgia, crystal arthropathies, gout, pseudogout, or CPPD disease/chondrocalcinosis), (ii) a spinal condition or disorder (e.g. discogenic disease, low back pain, neck pain, lumbar pain, degenerative disc disease, annual ligament tear, herniated disc, spinal facet joint arthritis, intervertebral disc disease, spondylosis, painful scoliosis, or spinal stenosis), (iii) a musculoskeletal disorder (e.g. fibrosis, scarring, infectious intermittent joint effusion, spondylarthritis, plantar fasciitis, degenerative polyarthritis, hemophilic arthropathy, inflammatory myopathy with abundant macrophages, or polymyositis), and/or any combinations thereof.

### UUU. SCN9A

[0745] In some embodiments, the disclosure provides one or more pharmaceutical compositions targeting an SCN9A gene, the composition comprising a plurality of LNPs, wherein the LNPs comprise an RNA-guided nuclease or a nucleic acid encoding an RNA-guided nuclease and at least one guide RNA or a nucleic acid encoding at least one guide RNA targeting an SCN9A gene, and an LNP system selected from any one of LNP001 to LNP240. In some embodiments, the at least one guide RNA has a crRNA sequence selected from SEQ ID NOs: 2148-2195. In some embodiments, the LNP system comprises the steroid component in a molar ratio from about 36 to about 46, or from about 38 to about 42. In some embodiments, the LNP system comprises the steroid component in a molar ratio of about 37, about 38, about 39, about 40, about 41, or about 42. In some embodiments, the steroid component comprises cholesterol. In some embodiments, the steroid component comprises cholesterol and one or more additional steroids, wherein cholesterol is about 60% (w/w) or more, about 65% (w/w) or more, about 70% (w/w) or more, about 75% (w/w) or more, or about 80% (w/w) or more of the steroid component. In some embodiments, the steroid component comprises dexamethasone. In some embodiments, the steroid component comprises a modified cholesterol, e.g., a hydroxy- or alkyl modification. In some embodiments, the steroid component comprises any other steroid disclosed herein. In some embodiments, the LNP system comprises the PEGylated Lipid Component in a molar ratio from about 1.5 to about 2.5. In some embodiments, the PEGylated Lipid Component comprises a PEG2000 lipid. In some embodiments, the PEGylated Lipid Component comprises one or more of DMG-PEG and/or DMG-C-PEG. In some embodiments, the PEGylated Lipid Component comprises one or more of DMG-PEG2000, DMG-C-PEG2000, DSG-PEG2000, C14-PEG2000, C16-PEG2000, and/or C18-PEG2000. In some embodiments, the plurality of LNPs have an average diameter between about 60 nm and about 120 nm. In some embodiments, the concentration of LNPs in the pharmaceutical composition is between 0.001 and 3 mg/ml. In some embodiments, the pharmaceutical composition targeting an SCN9A gene is formulated for treating one or more disorders selected from (i) a joint disease or illness (e.g., arthritis, post-traumatic arthritis, osteoarthritis, rheumatoid arthritis, psoriatic arthritis, lupus, ankylosing spondylitis, reactive arthritis, septic arthritis, juvenile idiopathic arthritis, fibromyalgia, crystal arthropathies, gout, pseudogout, or CPPD disease/chondrocalcinosis), (ii) a spinal condition or disorder (e.g. discogenic disease, low back pain, neck pain, lumbar pain, degenerative disc disease, annual ligament tear, herniated disc, spinal facet joint arthritis, intervertebral disc disease, spondylosis, painful scoliosis, or spinal stenosis), (iii) a musculoskeletal disorder (e.g. fibrosis, scarring, infectious intermittent joint effusion, spondylarthritis, plantar fasciitis, degenerative polyarthritis, hemophilic arthropathy, inflammatory myopathy with abundant macrophages, or polymyositis), and/or any combinations thereof.

### VVV. SCN10A

[0746] In some embodiments, the disclosure provides one or more pharmaceutical compositions targeting an SCN10A gene, the composition comprising a plurality of LNPs, wherein the LNPs comprise an RNA-guided nuclease or a nucleic acid encoding an RNA-guided nuclease and at least one guide RNA or a nucleic acid encoding at least one guide RNA targeting an SCN10A gene, and an LNP system selected from any one of LNP001 to LNP240. In some embodiments, the at least one guide RNA has a crRNA sequence selected from SEQ ID NOs: 2196-2243. In some embodiments, the LNP system comprises the steroid component in a molar ratio from about 36 to about 46, or from about 38 to about 42. In some embodiments, the LNP system comprises the steroid component in a molar ratio of about 37, about 38, about 39, about 40, about 41, or about 42. In some embodiments, the steroid component comprises cholesterol. In some embodiments, the steroid component comprises cholesterol and one or more additional steroids, wherein cholesterol is about 60% (w/w) or more, about 65% (w/w) or more, about 70% (w/w) or more, about 75% (w/w) or more, or about 80% (w/w) or more of the steroid component. In some embodiments, the steroid component comprises dexamethasone. In some embodiments, the steroid component comprises a modified cholesterol, e.g., a hydroxy- or alkyl modification. In some embodiments, the steroid component comprises any other steroid disclosed herein. In some embodiments, the LNP system comprises the PEGylated Lipid Component in a molar ratio from about 1.5 to about 2.5. In some embodiments, the PEGylated Lipid Component comprises a PEG2000 lipid. In some embodiments, the PEGylated Lipid Component comprises one or more of DMG-PEG and/or DMG-C-PEG. In some embodiments, the PEGylated Lipid Component comprises one or more of DMG-PEG2000, DMG-C-PEG2000, DSG-PEG2000, C14-PEG2000, C16-PEG2000, and/or C18-PEG2000. In some embodiments, the plurality of LNPs have an average diameter between about 60 nm and about 120 nm. In some embodiments, the concentration of LNPs in the pharmaceutical composition is between 0.001 and 3 mg/ml. In some embodiments, the pharmaceutical composition targeting an SCN10A gene is formulated for treating one or more disorders selected from (i) a joint disease or illness (e.g., arthritis, post-traumatic arthritis, osteoarthritis, rheumatoid arthritis, psoriatic arthritis, lupus, ankylosing spondylitis, reactive arthritis, septic arthritis, juvenile idiopathic arthritis, fibromyalgia, crystal arthropathies, gout, pseudogout, or CPPD disease/chondrocalcinosis), (ii) a spinal condition or disorder (e.g. discogenic disease, low back pain, neck pain, lumbar pain, degenerative disc disease, annual ligament tear, herniated disc, spinal facet joint arthritis, intervertebral disc disease, spondylosis, painful scoliosis, or spinal stenosis), (iii) a musculoskeletal disorder (e.g. fibrosis, scarring, infectious intermittent joint effusion, spondylarthritis, plantar fasciitis, degenerative polyarthritis, hemophilic arthropathy, inflammatory myopathy with abundant macrophages, or polymyositis), and/or any combinations thereof.

### WWW. SCN11A

[0747] In some embodiments, the disclosure provides one or more pharmaceutical compositions targeting an SCN11A gene, the composition comprising a plurality of LNPs, wherein the LNPs comprise an RNA-guided nuclease or a nucleic acid encoding an RNA-guided nuclease and at least one guide RNA or a nucleic acid encoding at least one guide RNA targeting an SCN11A gene, and an LNP system selected from any one of LNP001 to LNP240. In some embodiments, the at least one guide RNA has a crRNA sequence selected from SEQ ID NOs: 2244-2291. In some embodiments, the LNP system comprises the steroid component in a molar ratio from about 36 to about 46, or from about 38 to about 42. In some embodiments, the LNP system comprises the steroid component in a molar ratio of about 37, about 38, about 39, about 40, about 41, or about 42. In some embodiments, the steroid component comprises cholesterol. In some embodiments, the steroid component comprises cholesterol and one or more additional steroids, wherein cholesterol is about 60% (w/w) or more, about 65% (w/w) or more, about 70% (w/w) or more, about 75% (w/w) or more, or about 80% (w/w) or more of the steroid component. In some embodiments, the steroid component comprises dexamethasone. In some embodiments, the steroid component comprises a modified cholesterol, e.g., a hydroxy- or alkyl modification. In some embodiments, the steroid component comprises any other steroid disclosed herein. In some embodiments, the LNP system comprises the PEGylated Lipid Component in a molar ratio from about 1.5 to about 2.5. In some embodiments, the PEGylated Lipid Component comprises a PEG2000 lipid. In some embodiments, the PEGylated Lipid Component comprises one or more of DMG-PEG and/or DMG-C-PEG. In some embodiments, the PEGylated Lipid Component comprises one or more of DMG-PEG2000, DMG-C-PEG2000, DSG-PEG2000, C14-PEG2000, C16-PEG2000, and/or C18-PEG2000. In some embodiments, the plurality of LNPs have an average diameter between about 60 nm and about 120 nm. In some embodiments, the concentration of LNPs in the pharmaceutical composition is between 0.001 and 3 mg/ml. In some embodiments, the pharmaceutical composition targeting an SCN11A gene is formulated for treating one or more disorders selected from (i) a joint disease or illness (e.g., arthritis, post-traumatic arthritis, osteoarthritis, rheumatoid arthritis, psoriatic arthritis, lupus, ankylosing spondylitis, reactive arthritis, septic arthritis, juvenile idiopathic arthritis, fibromyalgia, crystal arthropathies, gout, pseudogout, or CPPD disease/chondrocalcinosis), (ii) a spinal condition or disorder (e.g. discogenic disease, low back pain, neck pain, lumbar pain, degenerative disc disease, annual ligament tear, herniated disc, spinal facet joint arthritis, intervertebral disc disease, spondylosis, painful scoliosis, or spinal stenosis), (iii) a musculoskeletal disorder (e.g. fibrosis, scarring, infectious intermittent joint effusion, spondylarthritis, plantar fasciitis, degenerative polyarthritis, hemophilic arthropathy, inflammatory myopathy with abundant macrophages, or polymyositis), and/or any combinations thereof.

### XXX. TAC1

[0748] In some embodiments, the disclosure provides one or more pharmaceutical compositions targeting an TAC1 gene, the composition comprising a plurality of LNPs, wherein the LNPs comprise an RNA-guided nuclease or a nucleic acid encoding an RNA-guided nuclease and at least one guide RNA or a nucleic acid encoding at least one guide RNA targeting an TAC1 gene, and an LNP system selected from any one of LNP001 to LNP240. In some embodiments, the at least one guide RNA has a crRNA sequence selected from SEQ ID NOs: 2292-2308. In some embodiments, the LNP system comprises the steroid component in a molar ratio from about 36 to about 46, or from about 38 to about 42. In some embodiments, the LNP system comprises the steroid component in a molar ratio of about 37, about 38, about 39, about 40, about 41, or about 42. In some embodiments, the steroid component comprises cholesterol. In some embodiments, the steroid component comprises cholesterol and one or more additional steroids, wherein cholesterol is about 60% (w/w) or more, about 65% (w/w) or more, about 70% (w/w) or more, about 75% (w/w) or more, or about 80% (w/w) or more of the steroid component. In some embodiments, the steroid component comprises dexamethasone. In some embodiments, the steroid component comprises a modified cholesterol, e.g., a hydroxy- or alkyl modification. In some embodiments, the steroid component comprises any other steroid disclosed herein. In some embodiments, the LNP system comprises the PEGylated Lipid Component in a molar ratio from about 1.5 to about 2.5. In some embodiments, the PEGylated Lipid Component comprises a PEG2000 lipid. In some embodiments, the PEGylated Lipid Component comprises one or more of DMG-PEG and/or DMG-C-PEG. In some embodiments, the PEGylated Lipid Component comprises one or more of DMG-PEG2000, DMG-C-PEG2000, DSG-PEG2000, C14-PEG2000, C16-PEG2000, and/or C18-PEG2000. In some embodiments, the plurality of LNPs have an average diameter between about 60 nm and about 120 nm. In some embodiments, the concentration of LNPs in the pharmaceutical composition is between 0.001 and 3 mg/ml. In some embodiments, the pharmaceutical composition targeting an TACT gene is formulated for treating one or more disorders selected from (i) a joint disease or illness (e.g., arthritis, post-traumatic arthritis, osteoarthritis, rheumatoid arthritis, psoriatic arthritis, lupus, ankylosing spondylitis, reactive arthritis, septic arthritis, juvenile idiopathic arthritis, fibromyalgia, crystal arthropathies, gout, pseudogout, or CPPD disease/chondrocalcinosis), (ii) a spinal condition or disorder (e.g. discogenic disease, low back pain, neck pain, lumbar pain, degenerative disc disease, annual ligament tear, herniated disc, spinal facet joint arthritis, intervertebral disc disease, spondylosis, painful scoliosis, or spinal stenosis), (iii) a musculoskeletal disorder (e.g. fibrosis, scarring, infectious intermittent joint effusion, spondylarthritis, plantar fasciitis, degenerative polyarthritis, hemophilic arthropathy, inflammatory myopathy with abundant macrophages, or polymyositis), and/or any combinations thereof.

### YYY. TAC3

[0749] In some embodiments, the disclosure provides one or more pharmaceutical compositions targeting an TAC3 gene, the composition comprising a plurality of LNPs, wherein the LNPs comprise an RNA-guided nuclease or a nucleic acid encoding an RNA-guided nuclease and at least one guide RNA or a nucleic acid encoding at least one guide RNA targeting an TAC3 gene, and an LNP system selected from any one of LNP001 to LNP240. In some embodiments, the at least one guide RNA has a crRNA sequence selected from SEQ ID NOs: 2309-2325. In some embodiments, the LNP system comprises the steroid component in a molar ratio from about 36 to about 46, or from about 38 to about 42. In some embodiments, the LNP system comprises the steroid component in a molar ratio of about 37, about 38, about 39, about 40, about 41, or about 42. In some embodiments, the steroid component comprises cholesterol. In some embodiments, the steroid component comprises cholesterol and one or more additional steroids, wherein cholesterol is about 60% (w/w) or more, about 65% (w/w) or more, about 70% (w/w) or more, about 75% (w/w) or more, or about 80% (w/w) or more of the steroid component. In some embodiments, the steroid component comprises dexamethasone. In some embodiments, the steroid component comprises a modified cholesterol, e.g., a hydroxy- or alkyl modification. In some embodiments, the steroid component comprises any other steroid disclosed herein. In some embodiments, the LNP system comprises the PEGylated Lipid Component in a molar ratio from about 1.5 to about 2.5. In some embodiments, the PEGylated Lipid Component comprises a PEG2000 lipid. In some embodiments, the PEGylated Lipid Component comprises one or more of DMG-PEG and/or DMG-C-PEG. In some embodiments, the PEGylated Lipid Component comprises one or more of DMG-PEG2000, DMG-C-PEG2000, DSG-PEG2000, C14-PEG2000, C16-PEG2000, and/or C18-PEG2000. In some embodiments, the plurality of LNPs have an average diameter between about 60 nm and about 120 nm. In some embodiments, the concentration of LNPs in the pharmaceutical composition is between 0.001 and 3 mg/ml. In some embodiments, the pharmaceutical composition targeting an TAC3 gene is formulated for treating one or more disorders selected from (i) a joint disease or illness (e.g., arthritis, post-traumatic arthritis, osteoarthritis, rheumatoid arthritis, psoriatic arthritis, lupus, ankylosing spondylitis, reactive arthritis, septic arthritis, juvenile idiopathic arthritis, fibromyalgia, crystal arthropathies, gout, pseudogout, or CPPD disease/chondrocalcinosis), (ii) a spinal condition or disorder (e.g. discogenic disease, low back pain, neck pain, lumbar pain, degenerative disc disease, annual ligament tear, herniated disc, spinal facet joint arthritis, intervertebral disc disease, spondylosis, painful scoliosis, or spinal stenosis), (iii) a musculoskeletal disorder (e.g. fibrosis, scarring, infectious intermittent joint effusion, spondylarthritis, plantar fasciitis, degenerative polyarthritis, hemophilic arthropathy, inflammatory myopathy with abundant macrophages, or polymyositis), and/or any combinations thereof.

### ZZZ. TACR1

[0750] In some embodiments, the disclosure provides one or more pharmaceutical compositions targeting an TACR1 gene, the composition comprising a plurality of LNPs, wherein the LNPs comprise an RNA-guided nuclease or a nucleic acid encoding an RNA-guided nuclease and at least one guide RNA or a nucleic acid encoding at least one guide RNA targeting an TACR1 gene, and an LNP system selected from any one of LNP001 to LNP240. In some embodiments, the at least one guide RNA has a crRNA sequence selected from SEQ ID NOs: 2326-2373. In some embodiments, the LNP system comprises the steroid component in a molar ratio from about 36 to about 46, or from about 38 to about 42. In some embodiments, the LNP system comprises the steroid component in a molar ratio of about 37, about 38, about 39, about 40, about 41, or about 42. In some embodiments, the steroid component comprises cholesterol. In some embodiments, the steroid component comprises cholesterol and one or more additional steroids, wherein cholesterol is about 60% (w/w) or more, about 65% (w/w) or more, about 70% (w/w) or more, about 75% (w/w) or more, or about 80% (w/w) or more of the steroid component. In some embodiments, the steroid component comprises dexamethasone. In some embodiments, the steroid component comprises a modified cholesterol, e.g., a hydroxy- or alkyl modification. In some embodiments, the steroid component comprises any other steroid disclosed herein. In some embodiments, the LNP system comprises the PEGylated Lipid Component in a molar ratio from about 1.5 to about 2.5. In some embodiments, the PEGylated Lipid Component comprises a PEG2000 lipid. In some embodiments, the PEGylated Lipid Component comprises one or more of DMG-PEG and/or DMG-C-PEG. In some embodiments, the PEGylated Lipid Component comprises one or more of DMG-PEG2000, DMG-C-PEG2000, DSG-PEG2000, C14-PEG2000, C16-PEG2000, and/or C18-PEG2000. In some embodiments, the plurality of LNPs have an average diameter between about 60 nm and about 120 nm. In some embodiments, the concentration of LNPs in the pharmaceutical composition is between 0.001 and 3 mg/ml. In some embodiments, the pharmaceutical composition targeting an TACR1 gene is formulated for treating one or more disorders selected from (i) a joint disease or illness (e.g., arthritis, post-traumatic arthritis, osteoarthritis, rheumatoid arthritis, psoriatic arthritis, lupus, ankylosing spondylitis, reactive arthritis, septic arthritis, juvenile idiopathic arthritis, fibromyalgia, crystal arthropathies, gout, pseudogout, or CPPD disease/chondrocalcinosis), (ii) a spinal condition or disorder (e.g. discogenic disease, low back pain, neck pain, lumbar pain, degenerative disc disease, annual ligament tear, herniated disc, spinal facet joint arthritis, intervertebral disc disease, spondylosis, painful scoliosis, or spinal stenosis), (iii) a musculoskeletal disorder (e.g. fibrosis, scarring, infectious intermittent joint effusion, spondylarthritis, plantar fasciitis, degenerative polyarthritis, hemophilic arthropathy, inflammatory myopathy with abundant macrophages, or polymyositis), and/or any combinations thereof.

### AAAA. TACR2

[0751] In some embodiments, the disclosure provides one or more pharmaceutical compositions targeting an TACR2 gene, the composition comprising a plurality of LNPs, wherein the LNPs comprise an RNA-guided nuclease or a nucleic acid encoding an RNA-guided nuclease and at least one guide RNA or a nucleic acid encoding at least one guide RNA targeting an TACR2 gene, and an LNP system selected from any one of LNP001 to LNP240. In some embodiments, the at least one guide RNA has a crRNA sequence selected from SEQ ID NOs: 2374-2421. In some embodiments, the LNP system comprises the steroid component in a molar ratio from about 36 to about 46, or from about 38 to about 42. In some embodiments, the LNP system comprises the steroid component in a molar ratio of about 37, about 38, about 39, about 40, about 41, or about 42. In some embodiments, the steroid component comprises cholesterol. In some embodiments, the steroid component comprises cholesterol and one or more additional steroids, wherein cholesterol is about 60% (w/w) or more, about 65% (w/w) or more, about 70% (w/w) or more, about 75% (w/w) or more, or about 80% (w/w) or more of the steroid component. In some embodiments, the steroid component comprises dexamethasone. In some embodiments, the steroid component comprises a modified cholesterol, e.g., a hydroxy- or alkyl modification. In some embodiments, the steroid component comprises any other steroid disclosed herein. In some embodiments, the LNP system comprises the PEGylated Lipid Component in a molar ratio from about 1.5 to about 2.5. In some embodiments, the PEGylated Lipid Component comprises a PEG2000 lipid. In some embodiments, the PEGylated Lipid Component comprises one or more of DMG-PEG and/or DMG-C-PEG. In some embodiments, the PEGylated Lipid Component comprises one or more of DMG-PEG2000, DMG-C-PEG2000, DSG-PEG2000, C14-PEG2000, C16-PEG2000, and/or C18-PEG2000. In some embodiments, the plurality of LNPs have an average diameter between about 60 nm and about 120 nm. In some embodiments, the concentration of LNPs in the pharmaceutical composition is between 0.001 and 3 mg/ml. In some embodiments, the pharmaceutical composition targeting an TACR2 gene is formulated for treating one or more disorders selected from (i) a joint disease or illness (e.g., arthritis, post-traumatic arthritis, osteoarthritis, rheumatoid arthritis, psoriatic arthritis, lupus, ankylosing spondylitis, reactive arthritis, septic arthritis, juvenile idiopathic arthritis, fibromyalgia, crystal arthropathies, gout, pseudogout, or CPPD disease/chondrocalcinosis), (ii) a spinal condition or disorder (e.g. discogenic disease, low back pain, neck pain, lumbar pain, degenerative disc disease, annual ligament tear, herniated disc, spinal facet joint arthritis, intervertebral disc disease, spondylosis, painful scoliosis, or spinal stenosis), (iii) a musculoskeletal disorder (e.g. fibrosis, scarring, infectious intermittent joint effusion, spondylarthritis, plantar fasciitis, degenerative polyarthritis, hemophilic arthropathy, inflammatory myopathy with abundant macrophages, or polymyositis), and/or any combinations thereof.

### BBBB. TACR3

[0752] In some embodiments, the disclosure provides one or more pharmaceutical compositions targeting an TACR3 gene, the composition comprising a plurality of LNPs, wherein the LNPs comprise an RNA-guided nuclease or a nucleic acid encoding an RNA-guided nuclease and at least one guide RNA or a nucleic acid encoding at least one guide RNA targeting an TACR3 gene, and an LNP system selected from any one of LNP001 to LNP240. In some embodiments, the at least one guide RNA has a crRNA sequence selected from SEQ ID NOs: 2422-2469. In some embodiments, the LNP system comprises the steroid component in a molar ratio from about 36 to about 46, or from about 38 to about 42. In some embodiments, the LNP system comprises the steroid component in a molar ratio of about 37, about 38, about 39, about 40, about 41, or about 42. In some embodiments, the steroid component comprises cholesterol. In some embodiments, the steroid component comprises cholesterol and one or more additional steroids, wherein cholesterol is about 60% (w/w) or more, about 65% (w/w) or more, about 70% (w/w) or more, about 75% (w/w) or more, or about 80% (w/w) or more of the steroid component. In some embodiments, the steroid component comprises dexamethasone. In some embodiments, the steroid component comprises a modified cholesterol, e.g., a hydroxy- or alkyl modification. In some embodiments, the steroid component comprises any other steroid disclosed herein. In some embodiments, the LNP system comprises the PEGylated Lipid Component in a molar ratio from about 1.5 to about 2.5. In some embodiments, the PEGylated Lipid Component comprises a PEG2000 lipid. In some embodiments, the PEGylated Lipid Component comprises one or more of DMG-PEG and/or DMG-C-PEG. In some embodiments, the PEGylated Lipid Component comprises one or more of DMG-PEG2000, DMG-C-PEG2000, DSG-PEG2000, C14-PEG2000, C16-PEG2000, and/or C18-PEG2000. In some embodiments, the plurality of LNPs have an average diameter between about 60 nm and about 120 nm. In some embodiments, the concentration of LNPs in the pharmaceutical composition is between 0.001 and 3 mg/ml. In some embodiments, the pharmaceutical composition targeting an TACR3 gene is formulated for treating one or more disorders selected from (i) a joint disease or illness (e.g., arthritis, post-traumatic arthritis, osteoarthritis, rheumatoid arthritis, psoriatic arthritis, lupus, ankylosing spondylitis, reactive arthritis, septic arthritis, juvenile idiopathic arthritis, fibromyalgia, crystal arthropathies, gout, pseudogout, or CPPD disease/chondrocalcinosis), (ii) a spinal condition or disorder (e.g. discogenic disease, low back pain, neck pain, lumbar pain, degenerative disc disease, annual ligament tear, herniated disc, spinal facet joint arthritis, intervertebral disc disease, spondylosis, painful scoliosis, or spinal stenosis), (iii) a musculoskeletal disorder (e.g. fibrosis, scarring, infectious intermittent joint effusion, spondylarthritis, plantar fasciitis, degenerative polyarthritis, hemophilic arthropathy, inflammatory myopathy with abundant macrophages, or polymyositis), and/or any combinations thereof.

### CCCC. TIMP1

[0753] In some embodiments, the disclosure provides one or more pharmaceutical compositions targeting an TIMP1 gene, the composition comprising a plurality of LNPs, wherein the LNPs comprise an RNA-guided nuclease or a nucleic acid encoding an RNA-guided nuclease and at least one guide RNA or a nucleic acid encoding at least one guide RNA targeting an TIMP1 gene, and an LNP system selected from any one of LNP001 to LNP240. In some embodiments, the at least one guide RNA has a crRNA sequence selected from SEQ ID NOs: 2470-2509. In some embodiments, the LNP system comprises the steroid component in a molar ratio from about 36 to about 46, or from about 38 to about 42. In some embodiments, the LNP system comprises the steroid component in a molar ratio of about 37, about 38, about 39, about 40, about 41, or about 42. In some embodiments, the steroid component comprises cholesterol. In some embodiments, the steroid component comprises cholesterol and one or more additional steroids, wherein cholesterol is about 60% (w/w) or more, about 65% (w/w) or more, about 70% (w/w) or more, about 75% (w/w) or more, or about 80% (w/w) or more of the steroid component. In some embodiments, the steroid component comprises dexamethasone. In some embodiments, the steroid component comprises a modified cholesterol, e.g., a hydroxy- or alkyl modification. In some embodiments, the steroid component comprises any other steroid disclosed herein. In some embodiments, the LNP system comprises the PEGylated Lipid Component in a molar ratio from about 1.5 to about 2.5. In some embodiments, the PEGylated Lipid Component comprises a PEG2000 lipid. In some embodiments, the PEGylated Lipid Component comprises one or more of DMG-PEG and/or DMG-C-PEG. In some embodiments, the PEGylated Lipid Component comprises one or more of DMG-PEG2000, DMG-C-PEG2000, DSG-PEG2000, C14-PEG2000, C16-PEG2000, and/or C18-PEG2000. In some embodiments, the plurality of LNPs have an average diameter between about 60 nm and about 120 nm. In some embodiments, the concentration of LNPs in the pharmaceutical composition is between 0.001 and 3 mg/ml. In some embodiments, the pharmaceutical composition targeting an TIMP1 gene is formulated for treating one or more disorders selected from (i) a joint disease or illness (e.g., arthritis, post-traumatic arthritis, osteoarthritis, rheumatoid arthritis, psoriatic arthritis, lupus, ankylosing spondylitis, reactive arthritis, septic arthritis, juvenile idiopathic arthritis, fibromyalgia, crystal arthropathies, gout, pseudogout, or CPPD disease/chondrocalcinosis), (ii) a spinal condition or disorder (e.g. discogenic disease, low back pain, neck pain, lumbar pain, degenerative disc disease, annual ligament tear, herniated disc, spinal facet joint arthritis, intervertebral disc disease, spondylosis, painful scoliosis, or spinal stenosis), (iii) a musculoskeletal disorder (e.g. fibrosis, scarring, infectious intermittent joint effusion, spondylarthritis, plantar fasciitis, degenerative polyarthritis, hemophilic arthropathy, inflammatory myopathy with abundant macrophages, or polymyositis), and/or any combinations thereof.

### DDDD. TIMP3

[0754] In some embodiments, the disclosure provides one or more pharmaceutical compositions targeting an TIMP3 gene, the composition comprising a plurality of LNPs, wherein the LNPs comprise an RNA-guided nuclease or a nucleic acid encoding an RNA-guided nuclease and at least one guide RNA or a nucleic acid encoding at least one guide RNA targeting an TIMP3 gene, and an LNP system selected from any one of LNP001 to LNP240. In some embodiments, the at least one guide RNA has a crRNA sequence selected from SEQ ID NOs: 2510-2557. In some embodiments, the LNP system comprises the steroid component in a molar ratio from about 36 to about 46, or from about 38 to about 42. In some embodiments, the LNP system comprises the steroid component in a molar ratio of about 37, about 38, about 39, about 40, about 41, or about 42. In some embodiments, the steroid component comprises cholesterol. In some embodiments, the steroid component comprises cholesterol and one or more additional steroids, wherein cholesterol is about 60% (w/w) or more, about 65% (w/w) or more, about 70% (w/w) or more, about 75% (w/w) or more, or about 80% (w/w) or more of the steroid component. In some embodiments, the steroid component comprises dexamethasone. In some embodiments, the steroid component comprises a modified cholesterol, e.g., a hydroxy- or alkyl modification. In some embodiments, the steroid component comprises any other steroid disclosed herein. In some embodiments, the LNP system comprises the PEGylated Lipid Component in a molar ratio from about 1.5 to about 2.5. In some embodiments, the PEGylated Lipid Component comprises a PEG2000 lipid. In some embodiments, the PEGylated Lipid Component comprises one or more of DMG-PEG and/or DMG-C-PEG. In some embodiments, the PEGylated Lipid Component comprises one or more of DMG-PEG2000, DMG-C-PEG2000, DSG-PEG2000, C14-PEG2000, C16-PEG2000, and/or C18-PEG2000. In some embodiments, the plurality of LNPs have an average diameter between about 60 nm and about 120 nm. In some embodiments, the concentration of LNPs in the pharmaceutical composition is between 0.001 and 3 mg/ml. In some embodiments, the pharmaceutical composition targeting an TIMP3 gene is formulated for treating one or more disorders selected from (i) a joint disease or illness (e.g., arthritis, post-traumatic arthritis, osteoarthritis, rheumatoid arthritis, psoriatic arthritis, lupus, ankylosing spondylitis, reactive arthritis, septic arthritis, juvenile idiopathic arthritis, fibromyalgia, crystal arthropathies, gout, pseudogout, or CPPD disease/chondrocalcinosis), (ii) a spinal condition or disorder (e.g. discogenic disease, low back pain, neck pain, lumbar pain, degenerative disc disease, annual ligament tear, herniated disc, spinal facet joint arthritis, intervertebral disc disease, spondylosis, painful scoliosis, or spinal stenosis), (iii) a musculoskeletal disorder (e.g. fibrosis, scarring, infectious intermittent joint effusion, spondylarthritis, plantar fasciitis, degenerative polyarthritis, hemophilic arthropathy, inflammatory myopathy with abundant macrophages, or polymyositis), and/or any combinations thereof.

### EEEE. TNF

[0755] In some embodiments, the disclosure provides one or more pharmaceutical compositions targeting an TNF gene, the composition comprising a plurality of LNPs, wherein the LNPs comprise an RNA-guided nuclease or a nucleic acid encoding an RNA-guided nuclease and at least one guide RNA or a nucleic acid encoding at least one guide RNA targeting an TNF gene, and an LNP system selected from any one of LNP001 to LNP240. In some embodiments, the at least one guide RNA has a crRNA sequence selected from SEQ ID NOs: 2558-2574. In some embodiments, the LNP system comprises the steroid component in a molar ratio from about 36 to about 46, or from about 38 to about 42. In some embodiments, the LNP system comprises the steroid component in a molar ratio of about 37, about 38, about 39, about 40, about 41, or about 42. In some embodiments, the steroid component comprises cholesterol. In some embodiments, the steroid component comprises cholesterol and one or more additional steroids, wherein cholesterol is about 60% (w/w) or more, about 65% (w/w) or more, about 70% (w/w) or more, about 75% (w/w) or more, or about 80% (w/w) or more of the steroid component. In some embodiments, the steroid component comprises dexamethasone. In some embodiments, the steroid component comprises a modified cholesterol, e.g., a hydroxy- or alkyl modification. In some embodiments, the steroid component comprises any other steroid disclosed herein. In some embodiments, the LNP system comprises the PEGylated Lipid Component in a molar ratio from about 1.5 to about 2.5. In some embodiments, the PEGylated Lipid Component comprises a PEG2000 lipid. In some embodiments, the PEGylated Lipid Component comprises one or more of DMG-PEG and/or DMG-C-PEG. In some embodiments, the PEGylated Lipid Component comprises one or more of DMG-PEG2000, DMG-C-PEG2000, DSG-PEG2000, C14-PEG2000, C16-PEG2000, and/or C18-PEG2000. In some embodiments, the plurality of LNPs have an average diameter between about 60 nm and about 120 nm. In some embodiments, the concentration of LNPs in the pharmaceutical composition is between 0.001 and 3 mg/ml. In some embodiments, the pharmaceutical composition targeting an TNF gene is formulated for treating one or more disorders selected from (i) a joint disease or illness (e.g., arthritis, post-traumatic arthritis, osteoarthritis, rheumatoid arthritis, psoriatic arthritis, lupus, ankylosing spondylitis, reactive arthritis, septic arthritis, juvenile idiopathic arthritis, fibromyalgia, crystal arthropathies, gout, pseudogout, or CPPD disease/chondrocalcinosis), (ii) a spinal condition or disorder (e.g. discogenic disease, low back pain, neck pain, lumbar pain, degenerative disc disease, annual ligament tear, herniated disc, spinal facet joint arthritis, intervertebral disc disease, spondylosis, painful scoliosis, or spinal stenosis), (iii) a musculoskeletal disorder (e.g. fibrosis, scarring, infectious intermittent joint effusion, spondylarthritis, plantar fasciitis, degenerative polyarthritis, hemophilic arthropathy, inflammatory myopathy with abundant macrophages, or polymyositis), and/or any combinations thereof.

### FFFF. YAP1

[0756] In some embodiments, the disclosure provides one or more pharmaceutical compositions targeting an YAP1 gene, the composition comprising a plurality of LNPs, wherein the LNPs comprise an RNA-guided nuclease or a nucleic acid encoding an RNA-guided nuclease and at least one guide RNA or a nucleic acid encoding at least one guide RNA targeting an YAP1 gene, and an LNP system selected from any one of LNP001 to LNP240. In some embodiments, the at least one guide RNA has a crRNA sequence selected from SEQ ID NOs: 2671-2718. In some embodiments, the LNP system comprises the steroid component in a molar ratio from about 36 to about 46, or from about 38 to about 42. In some embodiments, the LNP system comprises the steroid component in a molar ratio of about 37, about 38, about 39, about 40, about 41, or about 42. In some embodiments, the steroid component comprises cholesterol. In some embodiments, the steroid component comprises cholesterol and one or more additional steroids, wherein cholesterol is about 60% (w/w) or more, about 65% (w/w) or more, about 70% (w/w) or more, about 75% (w/w) or more, or about 80% (w/w) or more of the steroid component. In some embodiments, the steroid component comprises dexamethasone. In some embodiments, the steroid component comprises a modified cholesterol, e.g., a hydroxy- or alkyl modification. In some embodiments, the steroid component comprises any other steroid disclosed herein. In some embodiments, the LNP system comprises the PEGylated Lipid Component in a molar ratio from about 1.5 to about 2.5. In some embodiments, the PEGylated Lipid Component comprises a PEG2000 lipid. In some embodiments, the PEGylated Lipid Component comprises one or more of DMG-PEG and/or DMG-C-PEG. In some embodiments, the PEGylated Lipid Component comprises one or more of DMG-PEG2000, DMG-C-PEG2000, DSG-PEG2000, C14-PEG2000, C16-PEG2000, and/or C18-PEG2000. In some embodiments, the plurality of LNPs have an average diameter between about 60 nm and about 120 nm. In some embodiments, the concentration of LNPs in the pharmaceutical composition is between 0.001 and 3 mg/ml. In some embodiments, the pharmaceutical composition targeting an YAP1 gene is formulated for treating one or more disorders selected from (i) a joint disease or illness (e.g., arthritis, post-traumatic arthritis, osteoarthritis, rheumatoid arthritis, psoriatic arthritis, lupus, ankylosing spondylitis, reactive arthritis, septic arthritis, juvenile idiopathic arthritis, fibromyalgia, crystal arthropathies, gout, pseudogout, or CPPD disease/chondrocalcinosis), (ii) a spinal condition or disorder (e.g. discogenic disease, low back pain, neck pain, lumbar pain, degenerative disc disease, annual ligament tear, herniated disc, spinal facet joint arthritis, intervertebral disc disease, spondylosis, painful scoliosis, or spinal stenosis), (iii) a musculoskeletal disorder (e.g. fibrosis, scarring, infectious intermittent joint effusion, spondylarthritis, plantar fasciitis, degenerative polyarthritis, hemophilic arthropathy, inflammatory myopathy with abundant macrophages, or polymyositis), and/or any combinations thereof.

### VIII. Administration Routes

[0757] The methods and compositions herein described encompass the use of pharmaceutical compositions comprising a CRISPR gene-editing system as an active ingredient.

[0758] Depending on the method/route of administration, pharmaceutical dosage forms come in several types. These include many kinds of liquid, solid, and semisolid dosage forms. Common pharmaceutical dosage forms include pill, tablet, or capsule, drink or syrup, and natural or herbal form such as plant or food of sorts, among many others. Notably, the route of administration (ROA) for drug delivery is dependent on the dosage form of the substance in question. A liquid pharmaceutical dosage form is the liquid form of a dose of a chemical compound used as a drug or medication intended for administration or consumption.

[0759] As described below, a composition of the present disclosure can be delivered to a subject subcutaneously (e.g., intra-articular or intradiscal injection), dermally (e.g., transdermally via patch), and/or via implant. Exemplary pharmaceutical dosage forms include, e.g., pills, osmotic delivery systems, elixirs, emulsions, hydrogels, suspensions, syrups, capsules, tablets, orally dissolving tablets (ODTs), gel capsules, thin films, adhesive topical patches, lollipops, lozenges, chewing gum, dry powder inhalers (DPIs), vaporizers, nebulizers, metered dose inhalers (MDIs), ointments, transdermal patches, intradermal implant.

[0760] As used herein, “dermal delivery” or “dermal administration” can refer to a route of administration wherein the pharmaceutical dosage form is taken to, or through, the dermis (i.e., layer of skin between the epidermis (with which it makes up the cutis) and subcutaneous tissues). “Subcutaneous delivery” can refer to a route of administration wherein the pharmaceutical dosage form is to or beneath the subcutaneous tissue layer.

[0761] Methods of formulating suitable pharmaceutical compositions are known in the art, see, e.g., Remington: The Science and Practice of Pharmacy, 21st ed., 2005; and the books in the series Drugs and the Pharmaceutical Sciences: a Series of Textbooks and Monographs (Dekker, N.Y.). For example, solutions or suspensions used for parenteral, intradermal, or subcutaneous application can include the following components: a sterile diluent such as water for injection, saline solution, fixed oils, polyethylene glycols, glycerin, propylene glycol or other synthetic solvents; antibacterial agents such as benzyl alcohol or methyl parabens; antioxidants such as ascorbic acid or sodium bisulfate; chelating agents such as ethylenediaminetetraacetic acid; buffers such as acetates, citrates or phosphates and agents for the adjustment of tonicity such as sodium chloride or dextrose. pH can be adjusted with acids or bases, such as hydrochloric acid or sodium hydroxide. The parenteral preparation can be enclosed in ampoules, disposable syringes or multiple dose vials made of glass or plastic.

[0762] Pharmaceutical compositions suitable for injectable use can include sterile aqueous solutions (where water soluble) or dispersions and sterile powders for the extemporaneous preparation of sterile injectable solutions or dispersion. For intravenous administration, suitable carriers include physiological saline, bacteriostatic water, Cremophor EL™ (BASF, Parsippany, N.J.) or phosphate buffered saline (PBS). In all cases, the composition must be sterile and should be fluid to the extent that easy syringability exists. It should be stable under the conditions of manufacture and storage and must be preserved against the contaminating action of microorganisms such as bacteria and fungi. The carrier can be a solvent or dispersion medium containing, for example, water, ethanol, polyol (for example, glycerol, propylene glycol, and liquid polyethylene glycol, and the like), and suitable mixtures thereof. The proper fluidity can be maintained, for example, by the use of a coating such as lecithin, by the maintenance of the required particle size in the case of dispersion and by the use of surfactants. Prevention of the action of microorganisms can be achieved by various antibacterial and antifungal agents, for example, parabens, chlorobutanol, phenol, ascorbic acid, thimerosal, and the like. In many cases, it will be preferable to include isotonic agents, for example, sugars, polyalcohols such as mannitol, sorbitol, sodium chloride in the composition. Prolonged absorption of the injectable compositions can be brought about by including in the composition an agent that delays absorption, for example, aluminum monostearate and gelatin.

[0763] Sterile injectable solutions can be prepared by incorporating the active compound in the required amount in an appropriate solvent with one or a combination of ingredients enumerated above, as required, followed by filtered sterilization. Generally, dispersions are prepared by incorporating the active compound into a sterile vehicle, which contains a basic dispersion medium and the required other ingredients from those enumerated above. In the case of sterile powders for the preparation of sterile injectable solutions, the preferred methods of preparation are vacuum drying and freeze-drying, which yield a powder of the active ingredient plus any additional desired ingredient from a previously sterile-filtered solution thereof.

[0764] Therapeutic compounds that are or include nucleic acids can be administered by any method suitable for administration of nucleic acid agents, such as a DNA vaccine. These methods include gene guns, bio injectors, and skin patches as well as needle-free methods such as the micro-particle DNA vaccine technology disclosed in U.S. Pat. No. 6,194,389, and the mammalian transdermal needle-free vaccination with powder-form vaccine as disclosed in U.S. Pat. No. 6,168,587. Additionally, intranasal delivery is possible, as described in, inter alia, Hamajima et al., Clin. Immunol. Immunopathol., 88(2), 205-10 (1998). Liposomes (e.g., as described in U.S. Pat. No. 6,472,375) and microencapsulation can also be used. Biodegradable targetable microparticle delivery systems can also be used (e.g., as described in U.S. Pat. No. 6,471,996).

[0765] Therapeutic compounds can be prepared with carriers that will protect the therapeutic compounds against rapid elimination from the body, such as a controlled release formulation, including implants and microencapsulated delivery systems. Biodegradable, biocompatible polymers can be used, such as collagen, ethylene vinyl acetate, polyanhydrides (e.g., poly[1,3-bis(carboxyphenoxy)propane-co-sebacic-acid](PCPP-SA) matrix, fatty acid dimer-sebacic acid (FAD-SA) copolymer, poly(lactide-co-glycolide)), polyglycolic acid, collagen, polyorthoesters, polyethylene glycol-coated liposomes, hyaluronic acid and polylactic acid. Such formulations can be prepared using standard techniques, or obtained commercially, e.g., from Alza Corporation and Nova Pharmaceuticals, Inc. Liposomal suspensions (including liposomes targeted to selected cells with monoclonal antibodies to cellular antigens) can also be used as pharmaceutically acceptable carriers. These can be prepared according to methods known to those skilled in the art, for example, as described in U.S. Pat. No. 4,522,811. Semisolid, gelling, soft-gel, or other formulations (including controlled release) can be used, e.g., when administration to a surgical site is desired. Methods of making such formulations are known in the art and can include the use of biodegradable, biocompatible polymers. See, e.g., Sawyer et al., Yale J Biol Med. 2006 December; 79(3-4): 141-152.

[0766] The pharmaceutical compositions described herein may be included in a container, kit, pack, or dispenser together with instructions for administration.

### A. Systemic Administration

[0767] In some embodiments, a pharmaceutical composition comprising a CRISPR gene-editing system is administered systemically to a mammal in need thereof. In some embodiments, the composition is formulated for intravenous injection. In some embodiments, the composition is formulated for oral administration. In some embodiments, the composition is formulated for parenteral administration.

### B. Local Administration

[0768] In some embodiments, a pharmaceutical composition comprising a CRISPR gene-editing system is administered locally to a mammal in need thereof. In some embodiments, the local administration is an intra-articular injection. In some embodiments, the composition is formulated for intradiscal injection. In some embodiments, the composition is formulated for epidural injection. In some embodiments, the composition is formulated for peridiscal injection. In some embodiments, the composition is formulated for perivertebral injection. In some embodiments, composition is formulated for administration to the facet joints of the spine.

[0769] In some embodiments, a pharmaceutical composition comprising a CRISPR gene-editing system is administered locally to a mammal in need thereof during a surgical procedure. In some embodiments, a pharmaceutical composition comprising a CRISPR gene-editing system is administered locally to a mammal in need thereof 1, 2, 3, 4, 5, 6, 7, 8, 9, 10, 20, or 30 days after a surgical procedure.

### EXAMPLES

[0770] The embodiments encompassed herein are now described with reference to the following examples. These examples are provided for the purpose of illustration only and the disclosure encompassed herein should in no way be construed as being limited to these examples, but rather should be construed to encompass any and all variations which become evident as a result of the teachings provided herein.

### Example 1: Design of Crispr/Cas9 Guide RNAs Targeting cIL1A and cIL1B

[0771] Publicly accessible genomes (human, hg38; dog, CanFam3.1), collapsed gene models (merged Ensembl/Havana), tissue-specific exon expression (gtexportal.org) and various gRNA models were then used to select two to five individual crRNA sequences per gene, targeting canine and human interleukin-1 alpha (IL1A) and interleukin-1 beta (IL1B). The following gRNA design rules were applied:
[0772] 1. The gRNA target region was limited to the first 5-50% of the coding sequence (CDS).
[0773] 2. Single gRNAs were ranked according to maximal on-target editing using Azimuth 2.0 model (10.1038/nbt.3437) and minimal off-target editing using Cutting Frequencing Determination (CFD) (10.1038/nbt.3437) and the specificity score from Hsu et al. (10.1038/nbt.2647).
[0774] 3. Highly ranked sgRNA with high frameshift frequencies (>75%) and uniform DNA repair outcomes (>0.48) as predicted by inDelphi (10.1038/s41586-018-0686-x) were selected for in vitro synthesis.

[0775] Using these selection criteria, crRNA guide sequences targeting different exons of the respective target genes were selected for further investigation. Specifically, as shown in FIG. 83A, sg235 (SEQ ID NO:2719) and sg236 (SEQ ID NO:2720) targeting exons 3 and 4 of the hIL1A gene were selected. Likewise, as shown in FIG. 83B, sg237 (SEQ ID NO:2721), sg238 (SEQ ID NO: 2722), sg248 (SEQ ID NO: 2723), sg249 (SEQ ID NO: 2724), and sg250 (SEQ ID NO: 2725) targeting exons 3, 4, and 5 of the hIL1B gene were selected. As shown in FIG. 83C, sg239 (SEQ ID NO: 2726), sg240 (SEQ ID NO: 2727), sg251 (SEQ ID NO:2728), and sg252 (SEQ ID NO:2729) targeting exons 3, 4, and 5 of the cIL1A gene were selected. Likewise, as shown in FIG. 83D, sg241 (SEQ ID NO: 2730) and sg242 (SEQ ID NO: 2731) targeting exons 3 and 4 of the cIL1B gene were selected.

[0776] sgRNAs, fusing the selected crRNA guide sequences to a scaffold sequence were then synthesised (Synthego) with scaffold modifications designed to increase their stability and decrease their cellular immunogenicity. Primers for genotyping were designed to be at least 200 bp from the target site and generate PCR amplicons <1.5 kb and synthesized (Merck).

[0777] The following quantities were used for single electroporation-based transfection using the 4D-nucleofector (Lonza, Catalog AAF-1002B and AAF-1002X) and nucleocuvette strips. 80 pmol synthesised sgRNA were pre-complexed with 4 μg Cas9 nuclease at room temperature for at least 10 min. 300-400K dissociated cells were washed with PBS before resuspending them in 20 μl supplemented P3 nucleofection solution and adding the Cas9 RNP complex. These cells were then transferred into a nucleocuvette well and electroporated using the pulse code ER-100. Directly after electroporation, the nucleocuvette was placed into the 37° C./5% CO2 incubator for 10 min for the cells to recover from the electrical voltage. Afterwards, 80 μl growth medium was added to the nucleocuvette well and cells transferred into 6-well dishes with prewarmed growth medium.

[0778] Between two- and eleven-days post-electroporation, genomic DNA was extracted from 50-200K cells using DNeasy Blood & Tissue kit (Qiagen, Catalog 69506). Single gRNA target (and off-target) regions were amplified by PCR.

[0779] PCR products were size-verified by gel electrophoresis, purified using QIAquick PCR purification kit (Qiagen, Catalog 28106) and submitted for Sanger sequencing at Source BioScience. Sanger traces (ab1) were deconvoluted using ICE version 1.2 (found online at the URL github.com/synthego-open/ice) to infer CRISPR edits. In addition, machine-learning predictions of gene editing using the selected probes was generated using inDelphi. In addition, the predicted off-target sites were analysed through direct sequencing to verify whether gRNA facilitates off-target editing.

[0780] Results of the empirical experiments and machine-learning prediction of gene editing using the selected guide sequences are shown in FIG. 83 and support the overall design method for various gene targets in any well-annotated genome.

### Example 2: Functional Impact of IL1A/IL1B Editing

[0781] The sgRNAs with the highest knockout (KO) scores from Example 8 (i.e., the highest frameshift frequency) were used to generate double IL-1α/IL-1β knock out (KO) cells. Specifically, human chondrocytes were edited to achieve >99% IL-1α KO using crRNA sequence CAGAGACAGAUGAUCAAUGG and 67% IL-1β KO using crRNA sequence GUGCAGUUCAGUGAUCGUAC. Canine chondrocytes were edited to achieve 97% IL-1α KO using crRNA sequence GACAUCCCAGCUUACCUUCA and 99% IL-1β KO using crRNA sequence ACUCUUGUUACAGAGCUGGU.

[0782] Canine chondrocytes (Catalog Cn402K-05), human chondrocytes (Catalog 402-05a) and human fibroblast-like synovial cells (Catalog 408-05a) were purchased as frozen stocks (5×10\hat{ }5 cells) from Cell Applications, Inc., San Diego, CA. Chondrocytes were cultured in growth medium consisting of DMEM/Ham's F12 (Gibco, Catalog 21331-020) supplemented with 20% (v/v) untreated FBS (Gibco, Catalog 10270-106) and 1×GlutaMAX (Gibco, Catalog 35050-038). Synovial cells were cultured in growth medium consisting of DMEM (Gibco, Catalog 11960-044), 10% non-treated FBS (Gibco, Catalog 10270-106) and 1×GlutaMAX (Gibco, Catalog 35050-038). Cells were confirmed as being negative for Mycoplasma spp. and subjected to STR profiling prior to use. For electroporation and subculture, cells were dissociated using 0.25% trypsin (Gibco, Catalog 25200056). Trypsin was quenched with 9 volumes of growth medium and cells were spun at 1,000 g to remove the supernatant.

[0783] Interleukin-1 (IL-1) release was induced by challenging sub-confluent monolayers of cells (edited or wild-type non-edited) with lipopolysaccharide (LPS). In brief, non-edited (control) and double IL-1α/IL-1β KO (edited) human or canine chondrocytes were seeded at density of approximately 5×10⁴ cells per well in 24-well plates. After 24-48 hours, the medium was replaced with fresh, serum-free medium containing either LPS (50 μg/ml) or PBS vehicle and the plates returned to the incubator. Plates were harvested after 6 and 24 hours for the determination of IL-1 release. Media were snap-frozen in liquid nitrogen and stored at −20° C. until they were assayed.

[0784] The concentration of IL-1A and IL-1B in the culture medium was measured with species-specific commercial assays, following the manufacturer's instructions. Prior to measurement, frozen media were thawed and then centrifuged (1,500 g for 2 mins) in order to remove cellular debris. Aliquots of medium were measured in duplicate and the concentration of IL-1 determined from a standard curve of recombinant human or canine IL-1A or IL-1B, as appropriate. The results of IL-1 alpha release in canine cells are shown in FIGS. 84A (6 hours) and 84B (24 hours). The results of IL-1 beta release in canine cells are shown in FIGS. 84C (6 hours) and 84D (24 hours). The results of IL-1 alpha release in human cells are shown in FIGS. 85A (6 hours) and 85B (24 hours). The results of IL-1 beta release in human cells are shown in FIGS. 85C (6 hours) and 85D (24 hours).

[0785] Taken together, these results demonstrated the functional impact on editing either human or canine cells.

### Example 3: Impact of Cas9 Mutant with Enhanced Specificity

[0786] The analysis of gene editing specificity reported in Example 8 was repeated using an enhanced Specificity CRISPR associated protein 9. The eSpCas9 includes three specificity enhancing mutations: K848A, K1003A, and R1060A, as described in Slaymaker et al., Science, 351:84-88 (2016). Th eSpCas9 was expressed in E. coli and purified to homogeneity. The construct has a molecular weight of 161 kDa and contains N-terminal Flag-tags and a C-terminal hexa-His-tag. The sequence of the eSpCas9 is:

(SEQ ID NO: 2733)
MDYKDHDGDYKDHDIDYKDDDDKMAPKKKRKVGIHGVPAADKKYSIGLD
IGTNSVGWAVITDEYKVPSKKFKVLGNTDRHSIKKNLIGALLFDSGETA
EATRLKRTARRRYTRRKNRICYLQEIFSNEMAKVDDSFFHRLEESFLVE
EDKKHERHPIFGNIVDEVAYHEKYPTIYHLRKKLVDSTDKADLRLIYLA
LAHMIKFRGHFLIEGDLNPDNSDVDKLFIQLVQTYNQLFEENPINASGV
DAKAILSARLSKSRRLENLIAQLPGEKKNGLFGNLIALSLGLTPNFKSN
FDLAEDAKLQLSKDTYDDDLDNLLAQIGDQYADLFLAAKNLSDAILLSD
ILRVNTEITKAPLSASMIKRYDEHHQDLTLLKALVRQQLPEKYKEIFFD
QSKNGYAGYIDGGASQEEFYKFIKPILEKMDGTEELLVKLNREDLLRKQ
RTFDNGSIPHQIHLGELHAILRRQEDFYPFLKDNREKIEKILTFRIPYY
VGPLARGNSRFAWMTRKSEETITPWNFEEVVDKGASAQSFIERMTNFDK
NLPNEKVLPKHSLLYEYFTVYNELTKVKYVTEGMRKPAFLSGEQKKAIV
DLLFKTNRKVTVKQLKEDYFKKIECFDSVEISGVEDRFNASLGTYHDLL
KIIKDKDFLDNEENEDILEDIVLTLTLFEDREMIEERLKTYAHLFDDKV
MKQLKRRRYTGWGRLSRKLINGIRDKQSGKTILDFLKSDGFANRNFMQL
IHDDSLTFKEDIQKAQVSGQGDSLHEHIANLAGSPAIKKGILQTVKVVD
ELVKVMGRHKPENIVIEMARENQTTQKGQKNSRERMKRIEEGIKELGSQ
ILKEHPVENTQLQNEKLYLYYLQNGRDMYVDQELDINRLSDYDVDHIVP
QSFLADDSIDNKVLTRSDKNRGKSDNVPSEEVVKKMKNYWRQLLNAKLI
TQRKFDNLTKAERGGLSELDKAGFIKRQLVETRQITKHVAQILDSRMNT
KYDENDKLIREVKVITLKSKLVSDFRKDFQFYKVREINNYHHAHDAYLN
AVVGTALIKKYPALESEFVYGDYKVYDVRKMIAKSEQEIGKATAKYFFY
SNIMNFFKTEITLANGEIRKAPLIETNGETGEIVWDKGRDFATVRKVLS
MPQVNIVKKTEVQTGGFSKESILPKRNSDKLIARKKDWDPKKYGGFDSP
TVAYSVLVVAKVEKGKSKKLKSVKELLGITIMERSSFEKNPIDFLEAKG
YKEVKKDLIIKLPKYSLFELENGRKRMLASAGELQKGNELALPSKYVNF
LYLASHYEKLKGSPEDNEQKQLFVEQHKHYLDEIIEQISEFSKRVILAD
ANLDKVLSAYNKHRDKPIREQAENIIHLFTLTNLGAPAAFKYFDTTIDR
KRYTSTKEVLDATLIHQSITGLYETRIDLSQLGGDKRPAATKKAGQAKK
KKAAALEHHHHHH.

[0787] Briefly, the same sgRNAs used in Example 1, and shown in FIG. 83, were complexed with the eSpCas9. Single guide RNAs (sgRNAs), fusing the selected crRNA guide sequences to a scaffold sequence were then synthesised (Synthego) with scaffold modifications designed to increase their stability and decrease their cellular immunogenicity. Primers for genotyping were designed to be at least 200 bp from the target site and generate PCR amplicons <1.5 kb and synthesized (Merck).

[0788] The following quantities were used for single electroporation-based transfection using the 4D-nucleofector (Lonza, Catalog AAF-1002B and AAF-1002X) and nucleocuvette strips. 80 pmol synthesised sgRNA were pre-complexed with eSpCas9 nuclease at room temperature for at least 10 min. 300-400K dissociated cells were washed with PBS before resuspending them in 20 μl supplemented P3 nucleofection solution and adding the Cas9 RNP complex. These cells were then transferred into a nucleocuvette well and electroporated using the pulse code ER-100. Directly after electroporation, the nucleocuvette was placed into the 37° C./5% CO2 incubator for 10 min for the cells to recover from the electrical voltage. Afterwards, 80 μl growth medium was added to the nucleocuvette well and cells transferred into 6-well dishes with prewarmed growth medium.

[0789] Between two- and eleven-days post-electroporation, genomic DNA was extracted from 50-200K cells using DNeasy Blood & Tissue kit (Qiagen, Catalog 69506). Single gRNA target (and off-target) regions were amplified by PCR.

[0790] PCR products were size-verified by gel electrophoresis, purified using QIAquick PCR purification kit (Qiagen, Catalog 28106) and submitted for Sanger sequencing at Source BioScience. Sanger traces (ab1) were deconvoluted using ICE version 1.2 (found online at the URL github.com/synthego-open/ice) to infer CRISPR edits. In addition, machine-learning predictions of gene editing using the selected probes was generated using inDelphi. In addition, the predicted off-target sites were analysed through direct sequencing to verify whether gRNA facilitates off-target editing.

[0791] As compared to the Cas9 editing reported in Example 1, use of eSpCas9 reduces off-target editing without losing on-target activity. For example, the off-target editing by sgRNA #242 (targeting cIL1B) of three loci, having 2, 3, and 3 mismatches, respectively, were evaluated by amplifying and then sequencing the loci reported in Table 3. As shown in Table 3, the first off-target loci experienced no editing in the experiment described in Example 8, and was not tested here. The second off-target loci experienced almost complete off-target editing (98-99%) in the experiment described in Example 8, but experienced no editing when eSpCas9 was used. The third off-target loci experienced some editing (0-25%) in the experiment described in Example 8, but again experienced no editing when eSpCas9 was used. Further, as shown in Table 2, the “enhanced on-target score,” corresponding to editing using eSpCas9 as described in this example, for each sgRNA tested was as high, if not higher, than the “on-target score,” corresponding to the editing described in Example 1.

TABLE 2

| | | | On-target | | | | |
|---|---|---|---|---|---|---|---|
| | | | metrics | | | | |
| | Target | | On-target | Precision | Frameshift | Enhanced on-target | Off-target metrics |
| # | Exon # | Strand | score* | score** | %*** | score**** | Off-target score\hat{ } |
| sg235 | 3 | − | 69.5 | 0.57 | 93.7 | 72.4 | 67 |
| sg236 | 4 | − | 53.9 | 0.65 | 93.9 | 66.7 | 76.9 |

Human IL1B (IL1B-201; GRCh38)

| | | | | | | | |
|---|---|---|---|---|---|---|---|
| sg237 | 3 | + | 60.9 | 0.57 | 80 | 64.7 | 66.7 |
| sg238 | 4 | − | 58.3 | 0.6 | 86.3 | 65.7 | 49.3 |
| sg248 | 5 | + | 61.7 | 0.65 | 89.9 | 69.6 | 86.5 |
| sg249 | 5 | + | 68.2 | 0.52 | 75.3 | 65.9 | 93.8 |
| sg250 | 5 | − | 64.4 | 0.48 | 83.9 | 65.2 | 91 |

Canine IL1A (IL1A-201; CanFam3.1)

| | | | | | | | |
|---|---|---|---|---|---|---|---|
| sg239 | 3 | + | 49.5 | 0.55 | 78.3 | 58.1 | 57.7 |
| sg240 | 4 | + | 43.8 | 0.61 | 87.2 | 59.0 | 41.8 |
| sg251 | 5 | + | 72.1 | 0.49 | 77.6 | 67.7 | 85.1 |
| sg252 | 5 | − | 68.4 | 0.48 | 90.4 | 68.8 | 66.6 |

TABLE 3

| | | | | | | | | | CRISPR |
|---|---|---|---|---|---|---|---|---|---|
| | | | | | | | | CRISPR | Edits with |
| | | | | | | | | Edits | enhanced |
| | | | | Chrom- | | Posi- | Mis- | with | specificity |
| Sequence | PAM | Score | Gene | osome | Strand | tion | matches | Cas9 | Cas9 |
| ACTCTTGTTACAG | GGG | 100 | ENSCAFG00 | chr17 | 1 | 37022194 | 0 | | |
| AGCTGGT | | | 000007249 | | | | | | |
| ACTTTTGTTTCAG | CAG | 6.16161972 | | chr33 | −1 | 20234937 | 2 | 0% | |
| AGCTGGT | | | | | | | | | |
| CCTCATGCTACAG | GGG | 2.76564774 | | chr1 | −1 | 47541563 | 3 | 98-99% | 0% |
| AGCTGGT | | | | | | | | | |
| GTGCTTGTTACAG | GGG | 2.32143742 | | chr26 | −1 | 32323843 | 3 | 0-25% | 0% |
| AGCTGGT | | | | | | | | | |

### Example 4: Selection of gRNAs Targeting IL1A and IL1B in Humans and Canines

[0792] Given that the ultimate goal of CRISPR target design is fabrication of nucleotide sequences that will hybridize to genomic DNA sequences resulting in the most robust knockout of a targeted gene as part of the CRISPR/Cas system, the process begins with assessment of splicing at the target loci. Human IL1A exhibits almost exclusively canonical splicing (i.e., no major variants) across various tissue types with the mature mRNA including exons 2-7, making each of these a potential CRISPR gRNA target (FIG. 86). Additional functional analysis (see Michlits, et al. (2020). Nature Methods, 17(7), 708-716) of the hIL-1a gene demonstrated that all functional domains cluster within Exons 5-7. In order to avoid a truncation that retains residual post-editing functionality, hIL-1a CRISPR targets were limited to those upstream of the functional domain cluster (exons 2-4). In so doing, a resultant frameshift or premature stop codon (i.e., missense mutation) at the editing site will impact all functional domains.

[0793] Similar analysis of hIL1B found a stronger overall expression pattern and more variation in splicing as compared to hIL1A (FIG. 87). However, as no tissue exhibited a variant omitting exons 2-7, each of these remained viable CRISPR targets. Application of the same functional analysis tools for hIL-1b found that functional domains cluster in exons 5-7, leaving exons 2-4 as viable CRISPR targets.

[0794] Having established the human gene targets, emphasis then shifted to gRNA targeting domain design. Generated CRISPR targeting domains were first tested in silico through at least, four separate algorithms, yielding scores assessing cutting activity (On-Target score; see Doench et al. (2016). Nature Biotechnology, 34(2), 184-191), reproducibility of the particular mutation via double-strand break repair mechanisms (Precision score; inDelphi), likelihood of creating a frameshift mutation (Frameshift score; inDelphi), and specificity of gRNA binding (Off-Target score; CRISPOR) (FIG. 88). Cutoffs were set for On-Target score at >0.30 and for Off-Target scores of 0 for 0 or 1 mismatch (first two columns).

[0795] The same design process was then repeated for the orthologous canine gene targets. Splicing and functional analyses of canine IL-1a (cIL-1a) shows 6 exons (exons 2-7) incorporated in the mature mRNA, of which exons 6 and 7 contain functional domains (FIG. 89A). This leaves exons 2-5 as viable CRISPR targets. The mature mRNA of cIL1B contains exons 2-7, with the core function domains clustered in exons 5-7 (FIG. 89B). As such, exons 2-4 are potentially viable CRISPR targets. Generated candidate CRISPR targeting domains were then analyzed in silico; those exceeding the minimum cutoff scores are shown in FIG. 90.

### Example 5: Characterizing the Ablation of IL1A and IL1B in Primary Human and Canine Cells

[0796] Algorithm-validated gRNA targeting domains were then tested in primary cells. Briefly, plasmid DNA encoding a sgRNA with the selected targeting domain was introduced into the primary cells with an encoded Cas9 plasmid via electroporation. Pooled cell populations then underwent DNA extraction and sequencing to assess editing efficiency.

[0797] The results, shown in FIG. 91, demonstrate a wide range of editing efficiencies in both human (FIG. 91A) and canine (FIGS. 91B-91C) cells. Indeed, for each gene target, at least one targeting domain demonstrates effective editing (between 89% and 99%) with reproducibility between different cell types (in canine).

[0798] However, in addition to this robust editing of the gene target, sgRNA 242, which targets cIL1B, also exhibited high levels of off-target editing, as anticipated by the in silico analysis (FIG. 92). To rectify these off-target effects, the experiments were repeated with an engineered, enhanced-specificity Cas9 (eSpCas9). This engineered Cas9 completely abrogated the previously-observed off-target effects while still maintain maximal editing efficiency at the target site (FIG. 93). These data demonstrate that the lead candidate sgRNA targeting domain for each gene target can safely (i.e., without off-target effects) and reliably generate genetic knockouts through creation of a primary missense mutation within the targeted locus in human (FIG. 94A) and canine (FIG. 94B) chondrocytes.

[0799] Taken together, these data presented a strong profile for ablating gene expression of IL1A and IL1B in primary mammalian cells.

### Example 6: Coadministration of IL1A and IL1B-Targeted sgRNAs in Primary Mammalian Cells

[0800] Having observed robust and reproducible efficacy for each individual gRNA targeting domain, the lead candidates were next assessed in the context of co-administration in order to generate double knockouts. To do this, each sgRNA was administered to canine synoviocytes as described above either simultaneously or sequentially (in either order). The results show that sgRNA 242 is highly effective at knocking out cIL1B under all conditions (FIG. 95). Conversely, sgRNA 240, targeting cIL1A, demonstrated optimal efficacy when it edits first with both simultaneous and secondary administration reducing efficacy by roughly 30%. However, such significant reduction likely remains beyond the threshold needed to impact functionality at the organismal level. As such, these results show that more than one sgRNA may be used within a single cell, preferably to silence multiple genes within a single pathway, thereby maximizing functional efficacy.

### Example 7: Applicability to Additional Species

[0801] Interleukin 1 is a highly conserved gene in terms of both sequence and function among mammals (see Dinarello, C. A. (1991). Blood 77 (8): 1627-1652). As a result, the gRNA targeting domains that have been generated and characterized for specific species may result in efficient editing of the IL-1 locus of additional species. An alignment to discover conserved IL1A (FIG. 96A) and IL1B (FIG. 96B) gene target positions among humans, horses, dogs, and mice finds relatively few mismatched base pairs across all species at particular target positions. For example, sgRNA 239, targeting cIL1A, is predicted to also edit mouse IL1A. Given the reported flexibility within the CRISPR/Cas system to tolerate imperfect sequence alignments under certain conditions (see generally Zischewski, J., et al. (2017). Biotechnology Advances, 35(1), 95-104), cross-species reactivity for particular targeting domains is wholly anticipated for any number of conserved genes, including, but not limited to, any of those genes listed in Table 4.

TABLE 4
List of Potential pro-inflammatory gene targets.

6-phosphogluconate dehydrogenase (6PGD)
Alcohol dehydrogenase (ADH)
Aldehyde dehydrogenase (ALDH2)
AP-1
B-cell lymphoma-extra large (Bcl-XL)
BCL2 apoptosis regulator (Bcl-2)
Bcl-2-associated X protein (BAX)
Catalase (CAT)
c-Jun N-terminal kinase (JNK)
Coenzyme Q10
CYP2E1
Cytochrome c (Cyt c)
F1Fo-ATP synthase
Ferritin heavy chain (FHC)
Glucose-6-phosphate dehydrogenase (G6PD)
Glutamylcysteine synthetase (GCS)
Glutathione (GSH) synthase
Glutathione Peroxidase 1 (GPX1)
Glutathione Peroxidase 2 (GPX2)
Glutathione Peroxidase 3 (GPX3)
Glutathione Peroxidase 4 (GPX4)
Glutathione Peroxidase 5 (GPX5)
Glutathione Peroxidase 6 (GPX6)
Glutathione Peroxidase 7 (GPX7)
Glutathione Peroxidase 8 (GPX8)
Glutathione reductase (GR)
Glycerol 3-phosphate dehydrogenase
Growth arrest and DNA damage (GADD 45)
Hypoxia-inducible factor 1-alpha (HIF-1α)
Mitogen-activated protein kinase (MAPK)
NADH-ubiquinone oxidoreductase
NADPH oxidase 4 (NOX4)
NADPH oxidase 5 (NOX5)
Nuclear factor kappa-light-chain-enhancer of activated B cells (NF-κB)
Nuclear factor κB (NF-κB) essential modulator (NEMO)
p46Shc (SHC isoform)
p52Shc (SHC isoform)
p53 upregulated modulator of apoptosis (PUMA)
p66Shc (SHC isoform)
Phosphoinositide 3-kinase (PI3-K)
Proline oxidase (PIG6, POX)
Quinone oxidoreductase (PIG3, NQO1)
Sestrin 1 (SESN1)
Sestrin 2 (SESN2)
SHC adaptor protein 1 (SHC1)
Superoxide dismutase 1 (SOD1)
Superoxide dismutase 2 (SOD2)
Superoxide dismutase 3 (SOD3)
TNF alpha induced protein 3 (TNFAIP3)
Tumor protein 53 (p53)
Tumor protein p53 inducible nuclear protein 1 (TP53INP1)
Ubiquinol-cytochrome c oxidoreductase
2B4
ABCA1
ACP5
ADAR-1
ADSS
AIG1
AIM2
APOBEC3
ARRB2
B2M
BCAS3
BMP4
C10orf32
C21orf33
CASP1
CCL5
CD160
Cd53
CDKN2A
CHEK1
CNNM2
CNTNAP2
CSMD1
CTLA-4
CTSB
C-type lectin receptors CLRs
CXCL10
CYP17A1
DDX60
DYNC1I1
FOXO3a
GPC6
GRN
HCK
HECW1
HLA
IFI30
IFI44L
IFI6
IFITM
IFITM1/3
IFITM2
IFITM3
IL-18
IL-1α
IL-1β
interferon-γ
interleukin-12 (IL-12)
IRF
IRF-1
IRF3
IRF7
LAG-3
LIPC
MDA5/IFIH1
MPAK
MYH9
MYO16
MYO5A
NAIP
NF-κB
NLRC4
NLRP3
NOD2
nucleotide oligomerization and binding domain NOD-like receptors
OAS1
OAS2
OASL
parkin gene (PARK2)
PD-1
PLEKHG1
PRKCA
PTBP1
PYCARD
Pyrin-HIN (PYHIN) domain containing receptors (e.g. AIM2)
Any retinoic acid inducible gene-I (RIG-I)-like receptors (RLRs)_{—}
RFC3
RGS1
RIG-I/DDX58
SAMHD1
SF3A1/SF3B1
SFXN2
SLAMF7
SLC41A1
SLC8A1
SLCO3A1
STAT1
Tetherin
TLR5
TLR7
TLR9
Any Toll-like receptors (TLRs)
TREM2
TREX1
TRIM5
TTLL7
TYROBP

### Example 8: LNP Systems

[0802] In some embodiments, the following LNP systems are used to formulate pharmaceutical compositions described herein:

TABLE 5
LNP Systems (all values are a molar ratio relative to a 100 total)

| | | | Steroid | |
|---|---|---|---|---|
| | Ionizable | Neutral/Helper | System | PEGylated |
| | Lipid Component | Lipid Component | Component | Lipid Component |
| LNP | (molar ratio or molar | (molar ratio or | (molar ratio or | (molar ratio or |
| System# | ratio range) | molar ratio range) | molar ratio range) | molar ratio range) |
| LNP001 | Dlin-KC2-DMA (42-50) | DSPC (8-10) | (36-46) | (balance to 100) |
| LNP002 | Dlin-KC2-DMA (42-50) | DSPC (10-12) | (36-46) | (balance to 100) |
| LNP003 | Dlin-KC2-DMA (42-50) | DSPC (10 ± 0.5) | (36-46) | (balance to 100) |
| LNP004 | Dlin-KC2-DMA (42-50) | DOPE (8-10) | (36-46) | (balance to 100) |
| LNP005 | Dlin-KC2-DMA (42-50) | DOPE (10-12) | (36-46) | (balance to 100) |
| LNP006 | Dlin-KC2-DMA (42-50) | DOPE (10 ± 0.5) | (36-46) | (balance to 100) |
| LNP007 | Dlin-KC2-DMA (42-50) | DOTMA (8-10) | (36-46) | (balance to 100) |
| LNP008 | Dlin-KC2-DMA (42-50) | DOTMA (10-12) | (36-46) | (balance to 100) |
| LNP009 | Dlin-KC2-DMA (42-50) | DOTMA (10 ± 0.5) | (36-46) | (balance to 100) |
| LNP010 | Dlin-KC2-DMA (42-50) | DPPC (8-10) | (36-46) | (balance to 100) |
| LNP011 | Dlin-KC2-DMA (42-50) | DPPC (10-12) | (36-46) | (balance to 100) |
| LNP012 | Dlin-KC2-DMA (42-50) | DPPC (10 ± 0.5) | (36-46) | (balance to 100) |
| LNP013 | Dlin-KC2-DMA (40-48) | DSPC (8-10) | (36-46) | (balance to 100) |
| LNP014 | Dlin-KC2-DMA (40-48) | DSPC (10-12) | (36-46) | (balance to 100) |
| LNP015 | Dlin-KC2-DMA (40-48) | DSPC (10 ± 0.5) | (36-46) | (balance to 100) |
| LNP016 | Dlin-KC2-DMA (40-48) | DOPE (8-10) | (36-46) | (balance to 100) |
| LNP017 | Dlin-KC2-DMA (40-48) | DOPE (10-12) | (36-46) | (balance to 100) |
| LNP018 | Dlin-KC2-DMA (40-48) | DOPE (10 ± 0.5) | (36-46) | (balance to 100) |
| LNP019 | Dlin-KC2-DMA (40-48) | DOTMA (8-10) | (36-46) | (balance to 100) |
| LNP020 | Dlin-KC2-DMA (40-48) | DOTMA (10-12) | (36-46) | (balance to 100) |
| LNP021 | Dlin-KC2-DMA (40-48) | DOTMA (10 ± 0.5) | (36-46) | (balance to 100) |
| LNP022 | Dlin-KC2-DMA (40-48) | DPPC (8-10) | (36-46) | (balance to 100) |
| LNP023 | Dlin-KC2-DMA (40-48) | DPPC (10-12) | (36-46) | (balance to 100) |
| LNP024 | Dlin-KC2-DMA (40-48) | DPPC (10 ± 0.5) | (36-46) | (balance to 100) |
| LNP025 | Dlin-KC2-DMA (43-45) | DSPC (8-10) | (36-46) | (balance to 100) |
| LNP026 | Dlin-KC2-DMA (43-45) | DSPC (10-12) | (36-46) | (balance to 100) |
| LNP027 | Dlin-KC2-DMA (43-45) | DSPC (10 ± 0.5) | (36-46) | (balance to 100) |
| LNP028 | Dlin-KC2-DMA (43-45) | DOPE (8-10) | (36-46) | (balance to 100) |
| LNP029 | Dlin-KC2-DMA (43-45) | DOPE (10-12) | (36-46) | (balance to 100) |
| LNP030 | Dlin-KC2-DMA (43-45) | DOPE (10 ± 0.5) | (36-46) | (balance to 100) |
| LNP031 | Dlin-KC2-DMA (43-45) | DOTMA (8-10) | (36-46) | (balance to 100) |
| LNP032 | Dlin-KC2-DMA (43-45) | DOTMA (10-12) | (36-46) | (balance to 100) |
| LNP033 | Dlin-KC2-DMA (43-45) | DOTMA (10 ± 0.5) | (36-46) | (balance to 100) |
| LNP034 | Dlin-KC2-DMA (43-45) | DPPC (8-10) | (36-46) | (balance to 100) |
| LNP035 | Dlin-KC2-DMA (43-45) | DPPC (10-12) | (36-46) | (balance to 100) |
| LNP036 | Dlin-KC2-DMA (43-45) | DPPC (10 ± 0.5) | (36-46) | (balance to 100) |
| LNP037 | Dlin-KC2-DMA | DSPC (8-10) | (36-46) | (balance to 100) |
| | (44 ± 0.5) | | | |
| LNP038 | Dlin-KC2-DMA | DSPC (10-12) | (36-46) | (balance to 100) |
| | (44 ± 0.5) | | | |
| LNP039 | Dlin-KC2-DMA | DSPC (10 ± 0.5) | (36-46) | (balance to 100) |
| | (44 ± 0.5) | | | |
| LNP040 | Dlin-KC2-DMA | DOPE (8-10) | (36-46) | (balance to 100) |
| | (44 ± 0.5) | | | |
| LNP041 | Dlin-KC2-DMA | DOPE (10-12) | (36-46) | (balance to 100) |
| | (44 ± 0.5) | | | |
| LNP042 | Dlin-KC2-DMA | DOPE (10 ± 0.5) | (36-46) | (balance to 100) |
| | (44 ± 0.5) | | | |
| LNP043 | Dlin-KC2-DMA | DOTMA (8-10) | (36-46) | (balance to 100) |
| | (44 ± 0.5) | | | |
| LNP044 | Dlin-KC2-DMA | DOTMA (10-12) | (36-46) | (balance to 100) |
| | (44 ± 0.5) | | | |
| LNP045 | Dlin-KC2-DMA | DOTMA (10 ± 0.5) | (36-46) | (balance to 100) |
| | (44 ± 0.5) | | | |
| LNP046 | Dlin-KC2-DMA | DPPC (8-10) | (36-46) | (balance to 100) |
| | (44 ± 0.5) | | | |
| LNP047 | Dlin-KC2-DMA | DPPC (10-12) | (36-46) | (balance to 100) |
| | (44 ± 0.5) | | | |
| LNP048 | Dlin-KC2-DMA | DPPC (10 ± 0.5) | (36-46) | (balance to 100) |
| | (44 ± 0.5) | | | |
| LNP049 | Dlin-MC3-DMA (44-50) | DSPC (8-10) | (36-46) | (balance to 100) |
| LNP050 | Dlin-MC3-DMA (44-50) | DSPC (10-12) | (36-46) | (balance to 100) |
| LNP051 | Dlin-MC3-DMA (44-50) | DSPC (10 ± 0.5) | (36-46) | (balance to 100) |
| LNP052 | Dlin-MC3-DMA (44-50) | DOPE (8-10) | (36-46) | (balance to 100) |
| LNP053 | Dlin-MC3-DMA (44-50) | DOPE (10-12) | (36-46) | (balance to 100) |
| LNP054 | Dlin-MC3-DMA (44-50) | DOPE (10 ± 0.5) | (36-46) | (balance to 100) |
| LNP055 | Dlin-MC3-DMA (44-50) | DOTMA (8-10) | (36-46) | (balance to 100) |
| LNP056 | Dlin-MC3-DMA (44-50) | DOTMA (10-12) | (36-46) | (balance to 100) |
| LNP057 | Dlin-MC3-DMA (44-50) | DOTMA (10 ± 0.5) | (36-46) | (balance to 100) |
| LNP058 | Dlin-MC3-DMA (44-50) | DPPC (8-10) | (36-46) | (balance to 100) |
| LNP059 | Dlin-MC3-DMA (44-50) | DPPC (10-12) | (36-46) | (balance to 100) |
| LNP060 | Dlin-MC3-DMA (44-50) | DPPC (10 ± 0.5) | (36-46) | (balance to 100) |
| LNP061 | Dlin-MC3-DMA (50-54) | DSPC (8-10) | (36-46) | (balance to 100) |
| LNP062 | Dlin-MC3-DMA (50-54) | DSPC (10-12) | (36-46) | (balance to 100) |
| LNP063 | Dlin-MC3-DMA (50-54) | DSPC (10 ± 0.5) | (36-46) | (balance to 100) |
| LNP064 | Dlin-MC3-DMA (50-54) | DOPE (8-10) | (36-46) | (balance to 100) |
| LNP065 | Dlin-MC3-DMA (50-54) | DOPE (10-12) | (36-46) | (balance to 100) |
| LNP066 | Dlin-MC3-DMA (50-54) | DOPE (10 ± 0.5) | (36-46) | (balance to 100) |
| LNP067 | Dlin-MC3-DMA (50-54) | DOTMA (8-10) | (36-46) | (balance to 100) |
| LNP068 | Dlin-MC3-DMA (50-54) | DOTMA (10-12) | (36-46) | (balance to 100) |
| LNP069 | Dlin-MC3-DMA (50-54) | DOTMA (10 ± 0.5) | (36-46) | (balance to 100) |
| LNP070 | Dlin-MC3-DMA (50-54) | DPPC (8-10) | (36-46) | (balance to 100) |
| LNP071 | Dlin-MC3-DMA (50-54) | DPPC (10-12) | (36-46) | (balance to 100) |
| LNP072 | Dlin-MC3-DMA (50-54) | DPPC (10 ± 0.5) | (36-46) | (balance to 100) |
| LNP073 | Dlin-MC3-DMA (49-51) | DSPC (8-10) | (36-46) | (balance to 100) |
| LNP074 | Dlin-MC3-DMA (49-51) | DSPC (10-12) | (36-46) | (balance to 100) |
| LNP075 | Dlin-MC3-DMA (49-51) | DSPC (10 ± 0.5) | (36-46) | (balance to 100) |
| LNP076 | Dlin-MC3-DMA (49-51) | DOPE (8-10) | (36-46) | (balance to 100) |
| LNP077 | Dlin-MC3-DMA (49-51) | DOPE (10-12) | (36-46) | (balance to 100) |
| LNP078 | Dlin-MC3-DMA (49-51) | DOPE (10 ± 0.5) | (36-46) | (balance to 100) |
| LNP079 | Dlin-MC3-DMA (49-51) | DOTMA (8-10) | (36-46) | (balance to 100) |
| LNP080 | Dlin-MC3-DMA (49-51) | DOTMA (10-12) | (36-46) | (balance to 100) |
| LNP081 | Dlin-MC3-DMA (49-51) | DOTMA (10 ± 0.5) | (36-46) | (balance to 100) |
| LNP082 | Dlin-MC3-DMA (49-51) | DPPC (8-10) | (36-46) | (balance to 100) |
| LNP083 | Dlin-MC3-DMA (49-51) | DPPC (10-12) | (36-46) | (balance to 100) |
| LNP084 | Dlin-MC3-DMA (49-51) | DPPC (10 ± 0.5) | (36-46) | (balance to 100) |
| LNP085 | Dlin-MC3-DMA | DSPC (8-10) | (36-46) | (balance to 100) |
| | (50 ± 0.5) | | | |
| LNP086 | Dlin-MC3-DMA | DSPC (10-12) | (36-46) | (balance to 100) |
| | (50 ± 0.5) | | | |
| LNP087 | Dlin-MC3-DMA | DSPC (10 ± 0.5) | (36-46) | (balance to 100) |
| | (50 ± 0.5) | | | |
| LNP088 | Dlin-MC3-DMA | DOPE (8-10) | (36-46) | (balance to 100) |
| | (50 ± 0.5) | | | |
| LNP089 | Dlin-MC3-DMA | DOPE (10-12) | (36-46) | (balance to 100) |
| | (50 ± 0.5) | | | |
| LNP090 | Dlin-MC3-DMA | DOPE (10 ± 0.5) | (36-46) | (balance to 100) |
| | (50 ± 0.5) | | | |
| LNP091 | Dlin-MC3-DMA | DOTMA (8-10) | (36-46) | (balance to 100) |
| | (50 ± 0.5) | | | |
| LNP092 | Dlin-MC3-DMA | DOTMA (10-12) | (36-46) | (balance to 100) |
| | (50 ± 0.5) | | | |
| LNP093 | Dlin-MC3-DMA | DOTMA (10 ± 0.5) | (36-46) | (balance to 100) |
| | (50 ± 0.5) | | | |
| LNP094 | Dlin-MC3-DMA | DPPC (8-10) | (36-46) | (balance to 100) |
| | (50 ± 0.5) | | | |
| LNP095 | Dlin-MC3-DMA | DPPC (10-12) | (36-46) | (balance to 100) |
| | (50 ± 0.5) | | | |
| LNP096 | Dlin-MC3-DMA | DPPC (10 ± 0.5) | (36-46) | (balance to 100) |
| | (50 ± 0.5) | | | |
| LNP097 | SM-102 (44-50) | DSPC (8-10) | (36-46) | (balance to 100) |
| LNP098 | SM-102 (44-50) | DSPC (10-12) | (36-46) | (balance to 100) |
| LNP099 | SM-102 (44-50) | DSPC (10 ± 0.5) | (36-46) | (balance to 100) |
| LNP100 | SM-102 (44-50) | DOPE (8-10) | (36-46) | (balance to 100) |
| LNP101 | SM-102 (44-50) | DOPE (10-12) | (36-46) | (balance to 100) |
| LNP102 | SM-102 (44-50) | DOPE (10 ± 0.5) | (36-46) | (balance to 100) |
| LNP103 | SM-102 (44-50) | DOTMA (8-10) | (36-46) | (balance to 100) |
| LNP104 | SM-102 (44-50) | DOTMA (10-12) | (36-46) | (balance to 100) |
| LNP105 | SM-102 (44-50) | DOTMA (10 ± 0.5) | (36-46) | (balance to 100) |
| LNP106 | SM-102 (44-50) | DPPC (8-10) | (36-46) | (balance to 100) |
| LNP107 | SM-102 (44-50) | DPPC (10-12) | (36-46) | (balance to 100) |
| LNP108 | SM-102 (44-50) | DPPC (10 ± 0.5) | (36-46) | (balance to 100) |
| LNP109 | SM-102 (50-54) | DSPC (8-10) | (36-46) | (balance to 100) |
| LNP110 | SM-102 (50-54) | DSPC (10-12) | (36-46) | (balance to 100) |
| LNP111 | SM-102 (50-54) | DSPC (10 ± 0.5) | (36-46) | (balance to 100) |
| LNP112 | SM-102 (50-54) | DOPE (8-10) | (36-46) | (balance to 100) |
| LNP113 | SM-102 (50-54) | DOPE (10-12) | (36-46) | (balance to 100) |
| LNP114 | SM-102 (50-54) | DOPE (10 ± 0.5) | (36-46) | (balance to 100) |
| LNP115 | SM-102 (50-54) | DOTMA (8-10) | (36-46) | (balance to 100) |
| LNP116 | SM-102 (50-54) | DOTMA (10-12) | (36-46) | (balance to 100) |
| LNP117 | SM-102 (50-54) | DOTMA (10 ± 0.5) | (36-46) | (balance to 100) |
| LNP118 | SM-102 (50-54) | DPPC (8-10) | (36-46) | (balance to 100) |
| LNP119 | SM-102 (50-54) | DPPC (10-12) | (36-46) | (balance to 100) |
| LNP120 | SM-102 (50-54) | DPPC (10 ± 0.5) | (36-46) | (balance to 100) |
| LNP121 | SM-102 (49-51) | DSPC (8-10) | (36-46) | (balance to 100) |
| LNP122 | SM-102 (49-51) | DSPC (10-12) | (36-46) | (balance to 100) |
| LNP123 | SM-102 (49-51) | DSPC (10 ± 0.5) | (36-46) | (balance to 100) |
| LNP124 | SM-102 (49-51) | DOPE (8-10) | (36-46) | (balance to 100) |
| LNP125 | SM-102 (49-51) | DOPE (10-12) | (36-46) | (balance to 100) |
| LNP126 | SM-102 (49-51) | DOPE (10 ± 0.5) | (36-46) | (balance to 100) |
| LNP127 | SM-102 (49-51) | DOTMA (8-10) | (36-46) | (balance to 100) |
| LNP128 | SM-102 (49-51) | DOTMA (10-12) | (36-46) | (balance to 100) |
| LNP129 | SM-102 (49-51) | DOTMA (10 ± 0.5) | (36-46) | (balance to 100) |
| LNP130 | SM-102 (49-51) | DPPC (8-10) | (36-46) | (balance to 100) |
| LNP131 | SM-102 (49-51) | DPPC (10-12) | (36-46) | (balance to 100) |
| LNP132 | SM-102 (49-51) | DPPC (10 ± 0.5) | (36-46) | (balance to 100) |
| LNP133 | SM-102 (50 ± 0.5) | DSPC (8-10) | (36-46) | (balance to 100) |
| LNP134 | SM-102 (50 ± 0.5) | DSPC (10-12) | (36-46) | (balance to 100) |
| LNP135 | SM-102 (50 ± 0.5) | DSPC (10 ± 0.5) | (36-46) | (balance to 100) |
| LNP136 | SM-102 (50 ± 0.5) | DOPE (8-10) | (36-46) | (balance to 100) |
| LNP137 | SM-102 (50 ± 0.5) | DOPE (10-12) | (36-46) | (balance to 100) |
| LNP138 | SM-102 (50 ± 0.5) | DOPE (10 ± 0.5) | (36-46) | (balance to 100) |
| LNP139 | SM-102 (50 ± 0.5) | DOTMA (8-10) | (36-46) | (balance to 100) |
| LNP140 | SM-102 (50 ± 0.5) | DOTMA (10-12) | (36-46) | (balance to 100) |
| LNP141 | SM-102 (50 ± 0.5) | DOTMA (10 ± 0.5) | (36-46) | (balance to 100) |
| LNP142 | SM-102 (50 ± 0.5) | DPPC (8-10) | (36-46) | (balance to 100) |
| LNP143 | SM-102 (50 ± 0.5) | DPPC (10-12) | (36-46) | (balance to 100) |
| LNP144 | SM-102 (50 ± 0.5) | DPPC (10 ± 0.5) | (36-46) | (balance to 100) |
| LNP145 | ALC-0315 (44-50) | DSPC (8-10) | (36-46) | (balance to 100) |
| LNP146 | ALC-0315 (44-50) | DSPC (10-12) | (36-46) | (balance to 100) |
| LNP147 | ALC-0315 (44-50) | DSPC (10 ± 0.5) | (36-46) | (balance to 100) |
| LNP148 | ALC-0315 (44-50) | DOPE (8-10) | (36-46) | (balance to 100) |
| LNP149 | ALC-0315 (44-50) | DOPE (10-12) | (36-46) | (balance to 100) |
| LNP150 | ALC-0315 (44-50) | DOPE (10 ± 0.5) | (36-46) | (balance to 100) |
| LNP151 | ALC-0315 (44-50) | DOTMA (8-10) | (36-46) | (balance to 100) |
| LNP152 | ALC-0315 (44-50) | DOTMA (10-12) | (36-46) | (balance to 100) |
| LNP153 | ALC-0315 (44-50) | DOTMA (10 ± 0.5) | (36-46) | (balance to 100) |
| LNP154 | ALC-0315 (44-50) | DPPC (8-10) | (36-46) | (balance to 100) |
| LNP155 | ALC-0315 (44-50) | DPPC (10-12) | (36-46) | (balance to 100) |
| LNP156 | ALC-0315 (44-50) | DPPC (10 ± 0.5) | (36-46) | (balance to 100) |
| LNP157 | ALC-0315 (50-54) | DSPC (8-10) | (36-46) | (balance to 100) |
| LNP158 | ALC-0315 (50-54) | DSPC (10-12) | (36-46) | (balance to 100) |
| LNP159 | ALC-0315 (50-54) | DSPC (10 ± 0.5) | (36-46) | (balance to 100) |
| LNP160 | ALC-0315 (50-54) | DOPE (8-10) | (36-46) | (balance to 100) |
| LNP161 | ALC-0315 (50-54) | DOPE (10-12) | (36-46) | (balance to 100) |
| LNP162 | ALC-0315 (50-54) | DOPE (10 ± 0.5) | (36-46) | (balance to 100) |
| LNP163 | ALC-0315 (50-54) | DOTMA (8-10) | (36-46) | (balance to 100) |
| LNP164 | ALC-0315 (50-54) | DOTMA (10-12) | (36-46) | (balance to 100) |
| LNP165 | ALC-0315 (50-54) | DOTMA (10 ± 0.5) | (36-46) | (balance to 100) |
| LNP166 | ALC-0315 (50-54) | DPPC (8-10) | (36-46) | (balance to 100) |
| LNP167 | ALC-0315 (50-54) | DPPC (10-12) | (36-46) | (balance to 100) |
| LNP168 | ALC-0315 (50-54) | DPPC (10 ± 0.5) | (36-46) | (balance to 100) |
| LNP169 | ALC-0315 (49-51) | DSPC (8-10) | (36-46) | (balance to 100) |
| LNP170 | ALC-0315 (49-51) | DSPC (10-12) | (36-46) | (balance to 100) |
| LNP171 | ALC-0315 (49-51) | DSPC (10 ± 0.5) | (36-46) | (balance to 100) |
| LNP172 | ALC-0315 (49-51) | DOPE (8-10) | (36-46) | (balance to 100) |
| LNP173 | ALC-0315 (49-51) | DOPE (10-12) | (36-46) | (balance to 100) |
| LNP174 | ALC-0315 (49-51) | DOPE (10 ± 0.5) | (36-46) | (balance to 100) |
| LNP175 | ALC-0315 (49-51) | DOTMA (8-10) | (36-46) | (balance to 100) |
| LNP176 | ALC-0315 (49-51) | DOTMA (10-12) | (36-46) | (balance to 100) |
| LNP177 | ALC-0315 (49-51) | DOTMA (10 ± 0.5) | (36-46) | (balance to 100) |
| LNP178 | ALC-0315 (49-51) | DPPC (8-10) | (36-46) | (balance to 100) |
| LNP179 | ALC-0315 (49-51) | DPPC (10-12) | (36-46) | (balance to 100) |
| LNP180 | ALC-0315 (49-51) | DPPC (10 ± 0.5) | (36-46) | (balance to 100) |
| LNP181 | ALC-0315 (50 ± 0.5) | DSPC (8-10) | (36-46) | (balance to 100) |
| LNP182 | ALC-0315 (50 ± 0.5) | DSPC (10-12) | (36-46) | (balance to 100) |
| LNP183 | ALC-0315 (50 ± 0.5) | DSPC (10 ± 0.5) | (36-46) | (balance to 100) |
| LNP184 | ALC-0315 (50 ± 0.5) | DOPE (8-10) | (36-46) | (balance to 100) |
| LNP185 | ALC-0315 (50 ± 0.5) | DOPE (10-12) | (36-46) | (balance to 100) |
| LNP186 | ALC-0315 (50 ± 0.5) | DOPE (10 ± 0.5) | (36-46) | (balance to 100) |
| LNP187 | ALC-0315 (50 ± 0.5) | DOTMA (8-10) | (36-46) | (balance to 100) |
| LNP188 | ALC-0315 (50 ± 0.5) | DOTMA (10-12) | (36-46) | (balance to 100) |
| LNP189 | ALC-0315 (50 ± 0.5) | DOTMA (10 ± 0.5) | (36-46) | (balance to 100) |
| LNP190 | ALC-0315 (50 ± 0.5) | DPPC (8-10) | (36-46) | (balance to 100) |
| LNP191 | ALC-0315 (50 ± 0.5) | DPPC (10-12) | (36-46) | (balance to 100) |
| LNP192 | ALC-0315 (50 ± 0.5) | DPPC (10 ± 0.5) | (36-46) | (balance to 100) |
| LNP193 | LP01 (42-45) | DSPC (8-10) | (36-46) | (balance to 100) |
| LNP194 | LP01 (42-45) | DSPC (10-12) | (36-46) | (balance to 100) |
| LNP195 | LP01 (42-45) | DSPC (10 ± 0.5) | (36-46) | (balance to 100) |
| LNP196 | LP01 (42-45) | DOPE (8-10) | (36-46) | (balance to 100) |
| LNP197 | LP01 (42-45) | DOPE (10-12) | (36-46) | (balance to 100) |
| LNP198 | LP01 (42-45) | DOPE (10 ± 0.5) | (36-46) | (balance to 100) |
| LNP199 | LP01 (42-45) | DOTMA (8-10) | (36-46) | (balance to 100) |
| LNP200 | LP01 (42-45) | DOTMA (10-12) | (36-46) | (balance to 100) |
| LNP201 | LP01 (42-45) | DOTMA (10 ± 0.5) | (36-46) | (balance to 100) |
| LNP202 | LP01 (42-45) | DPPC (8-10) | (36-46) | (balance to 100) |
| LNP203 | LP01 (42-45) | DPPC (10-12) | (36-46) | (balance to 100) |
| LNP204 | LP01 (42-45) | DPPC (10 ± 0.5) | (36-46) | (balance to 100) |
| LNP205 | LP01 (45-50) | DSPC (8-10) | (36-46) | (balance to 100) |
| LNP206 | LP01 (45-50) | DSPC (10-12) | (36-46) | (balance to 100) |
| LNP207 | LP01 (45-50) | DSPC (10 ± 0.5) | (36-46) | (balance to 100) |
| LNP208 | LP01 (45-50) | DOPE (8-10) | (36-46) | (balance to 100) |
| LNP209 | LP01 (45-50) | DOPE (10-12) | (36-46) | (balance to 100) |
| LNP210 | LP01 (45-50) | DOPE (10 ± 0.5) | (36-46) | (balance to 100) |
| LNP211 | LP01 (45-50) | DOTMA (8-10) | (36-46) | (balance to 100) |
| LNP212 | LP01 (45-50) | DOTMA (10-12) | (36-46) | (balance to 100) |
| LNP213 | LP01 (45-50) | DOTMA (10 ± 0.5) | (36-46) | (balance to 100) |
| LNP214 | LP01 (45-50) | DPPC (8-10) | (36-46) | (balance to 100) |
| LNP215 | LP01 (45-50) | DPPC (10-12) | (36-46) | (balance to 100) |
| LNP216 | LP01 (45-50) | DPPC (10 ± 0.5) | (36-46) | (balance to 100) |
| LNP217 | LP01 (44-46) | DSPC (8-10) | (36-46) | (balance to 100) |
| LNP218 | LP01 (44-46) | DSPC (10-12) | (36-46) | (balance to 100) |
| LNP219 | LP01 (44-46) | DSPC (10 ± 0.5) | (36-46) | (balance to 100) |
| LNP220 | LP01 (44-46) | DOPE (8-10) | (36-46) | (balance to 100) |
| LNP221 | LP01 (44-46) | DOPE (10-12) | (36-46) | (balance to 100) |
| LNP222 | LP01 (44-46) | DOPE (10 ± 0.5) | (36-46) | (balance to 100) |
| LNP223 | LP01 (44-46) | DOTMA (8-10) | (36-46) | (balance to 100) |
| LNP224 | LP01 (44-46) | DOTMA (10-12) | (36-46) | (balance to 100) |
| LNP225 | LP01 (44-46) | DOTMA (10 ± 0.5) | (36-46) | (balance to 100) |
| LNP226 | LP01 (44-46) | DPPC (8-10) | (36-46) | (balance to 100) |
| LNP227 | LP01 (44-46) | DPPC (10-12) | (36-46) | (balance to 100) |
| LNP228 | LP01 (44-46) | DPPC (10 ± 0.5) | (36-46) | (balance to 100) |
| LNP229 | LP01 (45 ± 0.5) | DSPC (8-10) | (36-46) | (balance to 100) |
| LNP230 | LP01 (45 ± 0.5) | DSPC (10-12) | (36-46) | (balance to 100) |
| LNP231 | LP01 (45 ± 0.5) | DSPC (10 ± 0.5) | (36-46) | (balance to 100) |
| LNP232 | LP01 (45 ± 0.5) | DOPE (8-10) | (36-46) | (balance to 100) |
| LNP233 | LP01 (45 ± 0.5) | DOPE (10-12) | (36-46) | (balance to 100) |
| LNP234 | LP01 (45 ± 0.5) | DOPE (10 ± 0.5) | (36-46) | (balance to 100) |
| LNP235 | LP01 (45 ± 0.5) | DOTMA (8-10) | (36-46) | (balance to 100) |
| LNP236 | LP01 (45 ± 0.5) | DOTMA (10-12) | (36-46) | (balance to 100) |
| LNP237 | LP01 (45 ± 0.5) | DOTMA (10 ± 0.5) | (36-46) | (balance to 100) |
| LNP238 | LP01 (45 ± 0.5) | DPPC (8-10) | (36-46) | (balance to 100) |
| LNP239 | LP01 (45 ± 0.5) | DPPC (10-12) | (36-46) | (balance to 100) |
| LNP240 | LP01 (45 ± 0.5) | DPPC (10 ± 0.5) | (36-46) | (balance to 100) |

[0803] In some embodiments of any one LNP system LNP001 to LNP240, the LNP system comprises the steroid component in a molar ratio from about 36 to about 46, or from about 38 to about 42. In some embodiments of any one LNP system LNP001 to LNP240, the LNP system comprises the steroid component in a molar ratio of about 36±0.5, about 37±0.5, about 38±0.5, about 39±0.5, about 40±0.5, about 41±0.5, about 42±0.5, about 43±0.5, about 44±0.5, about 45±0.5, or about ±0.5. In some embodiments, the LNP system comprises the steroid component in a molar ratio of about 37, about 38, about 39, about 40, about 41, or about 42. In some embodiments of any one LNP system LNP001 to LNP240, the steroid component comprises cholesterol. In some embodiments of any one LNP system LNP001 to LNP240, the steroid component comprises cholesterol and one or more additional steroids, wherein cholesterol is about 60% (w/w) or more, about 65% (w/w) or more, about 70% (w/w) or more, about 75% (w/w) or more, or about 80% (w/w) or more of the steroid component. In some embodiments, the steroid component comprises dexamethasone. In some embodiments, the steroid component comprises a modified cholesterol, e.g., a hydroxy- or alkyl modification. In some embodiments, the steroid component comprises any other steroid disclosed herein. In some embodiments, the LNP system comprises the PEGylated Lipid Component in a molar ratio from about 1.5 to about 2.5. In some embodiments, the PEGylated Lipid Component comprises a PEG2000 lipid. In some embodiments, the PEGylated Lipid Component comprises one or more of DMG-PEG and/or DMG-C-PEG. In some embodiments, the PEGylated Lipid Component comprises one or more of DMG-PEG2000, DMG-C-PEG2000, DSG-PEG2000, C14-PEG2000, C16-PEG2000, and/or C18-PEG2000.

### Example 9: Screening of LNP Formulations

[0804] LNPs described herein typically include a Biodegradable Ionizable Lipid, a Helper phospholipid, Cholesterol (with the potentially addition of dexamethasone or other steroids), and a PEG2000 component. Molar Lipid Ratio described herein are ratio of ionizable lipid:helper lipid:cholesterol [:Dexamethasone]:PEG.

[0805] Modifying molar lipid ratios: Without wishing to be bound by any particular theory, when altering the molar lipid ratio of ionizable lipids, the amount of cholesterol or helper lipid would either be supplemented or decreased. Typically, ionizable lipids are kept at a set ratio, while helper lipids, cholesterol and PEG content are varied. If you were to alter the amount of PEG, you would subsequently adjust the amount of primarily cholesterol and sometimes the helper lipid. If altering the helper lipid, the amount of cholesterol in combination with this is adjusted. Dexamethasone, or another similar steroid in the LNP structure directly replaces some of the cholesterol due to similar chemical structures/function in the LNP.

[0806] Typical ionizable lipids are: Dlin-KC2-DMA: molar ratios between 42-50, e.g., and without limitation, 44; Dlin-MC3-DMA: molar ratios between 44-50, e.g., and without limitation, 50; SM-102 (Lipid H): molar ratios between 44-50, e.g., and without limitation, 50; ALC-0315: molar ratios between 44-50, e.g., and without limitation, 50; LP01 (LP000001): molar ratios between 42-50, e.g., and without limitation, 45. Helper Lipids can have molar ratios between 9-11, e.g., and without limitation, 10. Helper lipids include DSPC, DOPE, DOTMA, and DPPC. PEG2000 lipids have typical molar ratios between about 1.5 and about 2.5. These include, without limitation, DMG-PEG, DMG-C-PEG, DMG-PEG2000, DMG-C-PEG2000, DSG-PEG2000, and C14,16,18-PEG2000. Cholesterol molar lipid ratios are typically between about 36 and about 46. Dexamethasone or similar steroids supplement a portion of the molar lipid ratio of cholesterol, for example, and without limitation, a ratio of cholesterol:dexamethasone (C:D) of 9:1. Molar lipid ratio ranges of Cholesterol can be, without limitation, between about 8 and about 10 and Dexamethasone, without limitation, between about 0.1 and about 2. Without wishing to be bound by any particular theory, modifications or replacements for cholesterol can be considered, for example, and without limitation, hydroxy- or alkyl modification (e.g., to improve mRNA delivery) or substitution with potentially therapeutic moieties such as anti-inflammatory steroids. In some embodiments, Molar N/P ratios cab be between 1-8. Without wishing to be bound by any particular, it is believed that to reduce inflammatory response of LNPs in vivo, the ideal range is 1-5 for N/P, however, N/P ratios of 6-8 are tested.

[0807] In some embodiments, LNP formulations described herein include LP01:DSPC:Cholesterol:DMG-PEG2000, LP01:DSPC:Cholesterol:Dexamethasone:DMG-PEG2000, MC3:DSPC:Cholesterol:DMG-PEG2000, MC3:DSPC:Cholesterol:Dexamethasone:DMG-PEG2000, MC3:DSPC:Cholesterol:DMG-C-PEG2000, MC3:DSPC:Cholesterol:Dexamethasone:DMG-C-PEG2000, SM-102:DSPC:Cholesterol:DMG-PEG2000, SM-102:DSPC:Cholesterol:Dexamethasone:DMG-PEG2000, ALC-0315:DSPC:Cholesterol:DMG-PEG2000, ALC-0315:DSPC:Cholesterol:Dexamethasone:DMG-PEG2000. In some embodiemnts, molar ratios of formulations described herein include 50:10:38.5:1.5; 45:9:44:2.

[0808] Biophysical Assays: LNPs efficiency to encapsulate nucleic acids, meet sizing criteria and are homogeneity, stability after freeze-thaw cycles. Payloads encapsulated: GFP mRNA, Luciferase mRNA, and our CRISPR/cas9 therapeutic (sgRNA and cas9 mRNA).

TABLE 6
LNPs of various formulations created and screened.

| | | | RNA |
|---|---|---|---|
| ID | LNP Composition | Ratio | Payload |
| LNP 02 | MC3:DSPC:Cholesterol:D | 50:10:38.5:1.5 | OCB02::cas9 |
| | MG-PEG2000 | | mRNA |
| LNP 03 | MC3:DSPC:Cholesterol:De | 50:10:34.65: | OCB02::cas9 |
| | xamethasone:DMG- | 3.85:1.5 | mRNA |
| | PEG2000 | | |
| LNP 04 | MC3:DSPC:Cholesterol:D | 50:10:38.5:1.5 | OCB02::cas9 |
| | MG-C-PEG2000 | | mRNA |
| LNP 05 | KC2:DPPC:Cholesterol:C1 | 47.4:10.1: | Luciferase |
| | 6-C-PEG2000 | 39.5:4 | mRNA |
| LNP 07 | MC3:DPSC:Cholesterol:D | 50:10:38.5:1.5 | Luciferase |
| | MG-PEG2000 | | mRNA |

### Additional Notes on LNP Components:

[0809] Ionizable lipid (titratable charge): Contains a tertiary amine, making this positively charged at an acidic pH, neutrally charged at a physiological pH. Become protonated after endosomal uptake into the cytosol. See below for specifications on different types of ionizable lipids.

[0810] Helper phospholipid: anionic endosomal phospholipids that interact with protonated ionizable lipids to form cone shaped ion pairs that enhance cell membrane fusion and disruption, endosomal escape, and cargo release into cell cytosol.

[0811] Cholesterol: maintains nanoparticle membrane integrity, assists encapsulation of nucleic acids, and enhances circulation by reducing surface bound proteins.

[0812] Dexamethasone or similar steroids: provide an anti-inflammatory component to the LNPs, which decrease immunogenicity and increase transfection rates, particularly in vivo.

[0813] PEGylated lipid (PEG2000): improves circulation half-life, reduces aggregation of LNPs, and reduces interactions with serum proteins such as opsonins, enhancing stability in vivo. Additionally assists particle stability, particle sizing, and biodistribution.

### Ionizable Lipids:

[chemical structure]

[0814] Cationic lipids: such as DODMA, DOTMA, and DOTAP have a quaternary amine group, which leaves them permanently positively charged. Use of this alone was in the past proven to have poor circulation and increased toxicity in vivo. Led to the development of ionizable lipids.

[0815] Ionizable lipids are characterised by a replacing quaternary amine to be tertiary, which enables them to be pH dependent, i.e., is neutrally charged at physiological pH and becomes positively charged (protonated) at acidic pH.

[0816] This increases circulation half-life and reduces toxicity in vivo.

[0817] pKa of ionizable lipid drives performance in vivo. pKas between 6-6.7 have been shown to be optimal for delivery of RNA therapeutics. However, the relative pKa of combination of all components in LNP influences LNP transfection—tertiary amine, quaternary amino and hydroxyl group from ionizable lipid, helper lipids and cholesterol all alter relative pKa due to proximity between headgroups. This subsequently affects overall surface charge.

[0818] PH dependency enables efficient encapsulation of RNAs in acidic buffer as well as assists RNA release once uptaken by cells.

[0819] Further, these lipid pairs form an inverted hexagonal HII phase, which assists membrane disruption, endosomal escape, and subsequent payload release into cytosol of cells.

[0820] Albertson et al., 2022, Lipid packing theory showing relationship between amphipathic compounds and geometry once self-assembled. Proposed mechanism by which ionizable lipids mediate endosomal disruption (also known as molecular shape hypothesis). https://www.ncbi.nlm.nih.gov/pmc/articles/PMC9250827/

[0821] MC3, ALC-0135, SM-102 all have tertiary amines (making them ionizable), no stereo centres, and ester linkers. ALC-0135 and SM-102 have been improved upon MC3 to incorporate additional ester bonds (to assist with biodegradability and reduce bioaccumulation).

[0822] Unsaturation of linear tails increases delivery efficiency and fluidity in ionizable lipids, i.e., this enables bilayer lipids to form a non-bilayer phase that will increase membrane disruption and payload release. Additional research explored branching the tails of ionizable lipids, which further increased potency when delivering mRNA therapeutics due to an increase in protonation of ionizable lipids at endosomal pH and cross-section of lipid tails. This modification also led to an increase in cone-shape structure, which facilitates membrane disruption, endosomal escape, and payload release into the cytosol (Albertson et al., 2022).

[0823] LP01 incorporates increase in ester bonds as well as branching of tails, which has been shown to be an efficient and safe delivery system for in-vivo gene editing in animal models. LP01 has less liver bioaccumulation and fewer safety risks.

### REFERENCES

[0824] Hald Albertsen, C, Kulkami J A., Witzigmann D, Lind M, Petersson K and Simonsen J B. The role of lipid components in lipid nanoparticles for vaccines and gene therapy. Advanced Drug Delivery Reviews 2022; 188:114416.
[0825] Zhang H, Han X, Alameh M, Shepherd S J, Padilla M S, Xue L, et al. Rational design of anti-inflammatory lipid nanoparticles for mRNA delivery. J Biomed Mater Res A. 2022; 110(5):1101-8.
[0826] Finn J D, Smith A R, Patel M C, Shaw L, Youniss M R, Heteren J van, et al. A Single Administration of CRISPR/Cas9 Lipid Nanoparticles Achieves Robust and Persistent In Vivo Genome Editing. Cell Reports. 2018; 22(9):2227-35.
[0827] Han X, Zhang H., Butowska K, Swingle K L, Alameh A-G, Weissman A and Mitchell M J. An ionizable lipid toolbox for RNA delivery. Nat Commun 12, 7233 (2021). https://doi.org/10.1038/s41467-021-27493-0

[0828] All publications, patents, and patent applications herein are incorporated by reference to the same extent as if each individual publication, patent, or patent application was specifically and individually indicated to be incorporated by reference. In the event of a conflict between a term herein and a term in an incorporated reference, the term herein controls.

[0829] While some embodiments have been shown and described herein, it will be obvious to those skilled in the art that such embodiments are provided by way of example only. It is not intended that the disclosure be limited by the specific examples provided within the specification. While the disclosure has been described with reference to the aforementioned specification, the descriptions and illustrations of the embodiments herein are not meant to be construed in a limiting sense. Numerous variations, changes, and substitutions will now occur to those skilled in the art without departing from the disclosure.

[0830] Furthermore, it shall be understood that all aspects of the disclosure are not limited to the specific depictions, configurations or relative proportions set forth herein which depend upon a variety of conditions and variables. It should be understood that various alternatives to the embodiments of the disclosure described herein can be employed in practicing the disclosure. It is therefore contemplated that the disclosure shall also cover any such alternatives, modifications, variations or equivalents. It is intended that the following claims define the scope of the disclosure and that methods and structures within the scope of these claims and their equivalents be covered thereby.

[0831] The examples set forth above are provided to give those of ordinary skill in the art a complete disclosure and description of how to make and use the embodiments of the compositions, systems and methods of the disclosure, and are not intended to limit the scope of what the inventors regard as their invention. Modifications of the above-described modes for carrying out the embodiments of the disclosure that are obvious to persons of skill in the art are intended to be within the scope of the following claims. All patents and publications mentioned in the specification are indicative of the levels of skill of those skilled in the art to which the disclosure pertains.

[0832] All headings and section designations are used for clarity and reference purposes only and are not to be considered limiting in any way. For example, those of skill in the art will appreciate the usefulness of combining various aspects from different headings and sections as appropriate according to the spirit and scope of the disclosure described herein.

[0833] It is to be understood that the methods described herein are not limited to the particular methodology, protocols, subjects, and sequencing techniques described herein and as such can vary. It is also to be understood that the terminology used herein is for the purpose of describing particular embodiments only, and is not intended to limit the scope of the methods and compositions described herein, which will be limited only by the appended claims. While some embodiments of the present disclosure have been shown and described herein, it will be obvious to those skilled in the art that such embodiments are provided by way of example only. Numerous variations, changes, and substitutions will now occur to those skilled in the art without departing from the disclosure. It should be understood that various alternatives to the embodiments of the disclosure described herein can be employed in practicing the disclosure. It is intended that the following claims define the scope of the disclosure and that methods and structures within the scope of these claims and their equivalents be covered thereby.

[0834] Several aspects are described with reference to example applications for illustration. Unless otherwise indicated, any embodiment can be combined with any other embodiment. It should be understood that numerous specific details, relationships, and methods are set forth to provide a full understanding of the features described herein. A skilled artisan, however, will readily recognize that the features described herein can be practiced without one or more of the specific details or with other methods. The features described herein are not limited by the illustrated ordering of acts or events, as some acts can occur in different orders and/or concurrently with other acts or events. Furthermore, not all illustrated acts or events are required to implement a methodology in accordance with the features described herein.

[0835] While some embodiments have been shown and described herein, it will be obvious to those skilled in the art that such embodiments are provided by way of example only. It is not intended that the disclosure be limited by the specific examples provided within the specification. While the disclosure has been described with reference to the aforementioned specification, the descriptions and illustrations of the embodiments herein are not meant to be construed in a limiting sense. Numerous variations, changes, and substitutions will now occur to those skilled in the art without departing from the disclosure.

[0836] Furthermore, it shall be understood that all aspects of the disclosure are not limited to the specific depictions, configurations or relative proportions set forth herein which depend upon a variety of conditions and variables. It should be understood that various alternatives to the embodiments of the disclosure described herein can be employed in practicing the disclosure. It is therefore contemplated that the disclosure shall also cover any such alternatives, modifications, variations or equivalents. It is intended that the following claims define the scope of the disclosure and that methods and structures within the scope of these claims and their equivalents be covered thereby.

The application's sequence listing, which the Patent Office published only in electronic form, follows.

SEQUENCE LISTING (2732 sequences)

SEQ ID NO: 1 - RNA, 20 nt, synthetic construct
  misc_feature 1..20: note = Synthetic
  source 1..20: mol_type = other RNA
ccgaagcccgggtcatccgg

SEQ ID NO: 2 - RNA, 20 nt, synthetic construct
  misc_feature 1..20: note = Synthetic
  source 1..20: mol_type = other RNA
ctgacgctgcagtttaaagg

SEQ ID NO: 3 - RNA, 20 nt, synthetic construct
  misc_feature 1..20: note = Synthetic
  source 1..20: mol_type = other RNA
tggcgccgaagggatcacag

SEQ ID NO: 4 - RNA, 20 nt, synthetic construct
  misc_feature 1..20: note = Synthetic
  source 1..20: mol_type = other RNA
tggggccgaatataacatag

SEQ ID NO: 5 - RNA, 20 nt, synthetic construct
  misc_feature 1..20: note = Synthetic
  source 1..20: mol_type = other RNA
tctcctattcctgaccagcg

SEQ ID NO: 6 - RNA, 20 nt, synthetic construct
  misc_feature 1..20: note = Synthetic
  source 1..20: mol_type = other RNA
ttggagctgctggcgccgaa

SEQ ID NO: 7 - RNA, 20 nt, synthetic construct
  misc_feature 1..20: note = Synthetic
  source 1..20: mol_type = other RNA
agcgactgcacgttgaagga

SEQ ID NO: 8 - RNA, 20 nt, synthetic construct
  misc_feature 1..20: note = Synthetic
  source 1..20: mol_type = other RNA
caacagcgactgcacgttga

SEQ ID NO: 9 - RNA, 20 nt, synthetic construct
  misc_feature 1..20: note = Synthetic
  source 1..20: mol_type = other RNA
agtttgtgggaactcgaggg

SEQ ID NO: 10 - RNA, 20 nt, synthetic construct
  misc_feature 1..20: note = Synthetic
  source 1..20: mol_type = other RNA
agcagaatgtgccccgaatg

SEQ ID NO: 11 - RNA, 20 nt, synthetic construct
  misc_feature 1..20: note = Synthetic
  source 1..20: mol_type = other RNA
gtagcggggccgggaacatg

SEQ ID NO: 12 - RNA, 20 nt, synthetic construct
  misc_feature 1..20: note = Synthetic
  source 1..20: mol_type = other RNA
gcgattaatgctacttgcaa

SEQ ID NO: 13 - RNA, 20 nt, synthetic construct
  misc_feature 1..20: note = Synthetic
  source 1..20: mol_type = other RNA
taaagtttgtgggaactcga

SEQ ID NO: 14 - RNA, 20 nt, synthetic construct
  misc_feature 1..20: note = Synthetic
  source 1..20: mol_type = other RNA
ggacttcttcactggacacg

SEQ ID NO: 15 - RNA, 20 nt, synthetic construct
  misc_feature 1..20: note = Synthetic
  source 1..20: mol_type = other RNA
ccgcgacctccggatgaccc

SEQ ID NO: 16 - RNA, 20 nt, synthetic construct
  misc_feature 1..20: note = Synthetic
  source 1..20: mol_type = other RNA
atgcatccctttctgcgaga

SEQ ID NO: 17 - RNA, 20 nt, synthetic construct
  misc_feature 1..20: note = Synthetic
  source 1..20: mol_type = other RNA
aagtagcattaatcgcctcc

SEQ ID NO: 18 - RNA, 20 nt, synthetic construct
  misc_feature 1..20: note = Synthetic
  source 1..20: mol_type = other RNA
ccctccctggtcctcattcg

SEQ ID NO: 19 - RNA, 20 nt, synthetic construct
  misc_feature 1..20: note = Synthetic
  source 1..20: mol_type = other RNA
tagcttattatagcccagtt

SEQ ID NO: 20 - RNA, 20 nt, synthetic construct
  misc_feature 1..20: note = Synthetic
  source 1..20: mol_type = other RNA
ggtctttaccgagtctctgg

SEQ ID NO: 21 - RNA, 20 nt, synthetic construct
  misc_feature 1..20: note = Synthetic
  source 1..20: mol_type = other RNA
cagcacgaaaggaaccacgc

SEQ ID NO: 22 - RNA, 20 nt, synthetic construct
  misc_feature 1..20: note = Synthetic
  source 1..20: mol_type = other RNA
cacagactcacatatggacg

SEQ ID NO: 23 - RNA, 20 nt, synthetic construct
  misc_feature 1..20: note = Synthetic
  source 1..20: mol_type = other RNA
gtgatcgccactcacagcta

SEQ ID NO: 24 - RNA, 20 nt, synthetic construct
  misc_feature 1..20: note = Synthetic
  source 1..20: mol_type = other RNA
aacgttcagtacttgatgtc

SEQ ID NO: 25 - RNA, 20 nt, synthetic construct
  misc_feature 1..20: note = Synthetic
  source 1..20: mol_type = other RNA
ctggcgccgaagggatcaca

SEQ ID NO: 26 - RNA, 20 nt, synthetic construct
  misc_feature 1..20: note = Synthetic
  source 1..20: mol_type = other RNA
cgtcgaaatgctgagcagca

SEQ ID NO: 27 - RNA, 20 nt, synthetic construct
  misc_feature 1..20: note = Synthetic
  source 1..20: mol_type = other RNA
ctgggtctttaccgagtctc

SEQ ID NO: 28 - RNA, 20 nt, synthetic construct
  misc_feature 1..20: note = Synthetic
  source 1..20: mol_type = other RNA
cagcgtggttcctttcgtgc

SEQ ID NO: 29 - RNA, 20 nt, synthetic construct
  misc_feature 1..20: note = Synthetic
  source 1..20: mol_type = other RNA
ggtcgcggcgccagcacgaa

SEQ ID NO: 30 - RNA, 20 nt, synthetic construct
  misc_feature 1..20: note = Synthetic
  source 1..20: mol_type = other RNA
caacatcgttgggtctgtcc

SEQ ID NO: 31 - RNA, 20 nt, synthetic construct
  misc_feature 1..20: note = Synthetic
  source 1..20: mol_type = other RNA
gtcacaaaatcctactgtac

SEQ ID NO: 32 - RNA, 20 nt, synthetic construct
  misc_feature 1..20: note = Synthetic
  source 1..20: mol_type = other RNA
aatgcatccctttctgcgag

SEQ ID NO: 33 - RNA, 20 nt, synthetic construct
  misc_feature 1..20: note = Synthetic
  source 1..20: mol_type = other RNA
gggcactcactgctattacc

SEQ ID NO: 34 - RNA, 20 nt, synthetic construct
  misc_feature 1..20: note = Synthetic
  source 1..20: mol_type = other RNA
ataaagtttgtgggaactcg

SEQ ID NO: 35 - RNA, 20 nt, synthetic construct
  misc_feature 1..20: note = Synthetic
  source 1..20: mol_type = other RNA
gcgttcttgaaaacactcct

SEQ ID NO: 36 - RNA, 20 nt, synthetic construct
  misc_feature 1..20: note = Synthetic
  source 1..20: mol_type = other RNA
ggagcagaacatgatccgga

SEQ ID NO: 37 - RNA, 20 nt, synthetic construct
  misc_feature 1..20: note = Synthetic
  source 1..20: mol_type = other RNA
ccaattcatgagttgtaacc

SEQ ID NO: 38 - RNA, 20 nt, synthetic construct
  misc_feature 1..20: note = Synthetic
  source 1..20: mol_type = other RNA
catctatcggaacacttcat

SEQ ID NO: 39 - RNA, 20 nt, synthetic construct
  misc_feature 1..20: note = Synthetic
  source 1..20: mol_type = other RNA
catcgcttctacagatacat

SEQ ID NO: 40 - RNA, 20 nt, synthetic construct
  misc_feature 1..20: note = Synthetic
  source 1..20: mol_type = other RNA
tcatcgcttctacagataca

SEQ ID NO: 41 - RNA, 20 nt, synthetic construct
  misc_feature 1..20: note = Synthetic
  source 1..20: mol_type = other RNA
ttcttcactggacacgtggt

SEQ ID NO: 42 - RNA, 20 nt, synthetic construct
  misc_feature 1..20: note = Synthetic
  source 1..20: mol_type = other RNA
gtctttaccgagtctctggt

SEQ ID NO: 43 - RNA, 20 nt, synthetic construct
  misc_feature 1..20: note = Synthetic
  source 1..20: mol_type = other RNA
caaatgtgagaaacgagtac

SEQ ID NO: 44 - RNA, 20 nt, synthetic construct
  misc_feature 1..20: note = Synthetic
  source 1..20: mol_type = other RNA
tgctgttccctctcgcagaa

SEQ ID NO: 45 - RNA, 20 nt, synthetic construct
  misc_feature 1..20: note = Synthetic
  source 1..20: mol_type = other RNA
tgggctagaaccctagagtc

SEQ ID NO: 46 - RNA, 20 nt, synthetic construct
  misc_feature 1..20: note = Synthetic
  source 1..20: mol_type = other RNA
gccgcgacctccggatgacc

SEQ ID NO: 47 - RNA, 20 nt, synthetic construct
  misc_feature 1..20: note = Synthetic
  source 1..20: mol_type = other RNA
cgtgctggcgccgcgacctc

SEQ ID NO: 48 - RNA, 20 nt, synthetic construct
  misc_feature 1..20: note = Synthetic
  source 1..20: mol_type = other RNA
cgaaaggaaccacgctggtc

SEQ ID NO: 49 - RNA, 20 nt, synthetic construct
  misc_feature 1..20: note = Synthetic
  source 1..20: mol_type = other RNA
ctgccggttggcatcgtacg

SEQ ID NO: 50 - RNA, 20 nt, synthetic construct
  misc_feature 1..20: note = Synthetic
  source 1..20: mol_type = other RNA
tacatgtgctggctgcatcg

SEQ ID NO: 51 - RNA, 20 nt, synthetic construct
  misc_feature 1..20: note = Synthetic
  source 1..20: mol_type = other RNA
tgtgtccagtcaccgctatg

SEQ ID NO: 52 - RNA, 20 nt, synthetic construct
  misc_feature 1..20: note = Synthetic
  source 1..20: mol_type = other RNA
cgacgtcggcggcacgtgcg

SEQ ID NO: 53 - RNA, 20 nt, synthetic construct
  misc_feature 1..20: note = Synthetic
  source 1..20: mol_type = other RNA
ggagactgttcgagaacgtg

SEQ ID NO: 54 - RNA, 20 nt, synthetic construct
  misc_feature 1..20: note = Synthetic
  source 1..20: mol_type = other RNA
tggccgtgtcggacgcactc

SEQ ID NO: 55 - RNA, 20 nt, synthetic construct
  misc_feature 1..20: note = Synthetic
  source 1..20: mol_type = other RNA
atgcagcgagctgtgcccga

SEQ ID NO: 56 - RNA, 20 nt, synthetic construct
  misc_feature 1..20: note = Synthetic
  source 1..20: mol_type = other RNA
gactgttcgagaacgtgcgg

SEQ ID NO: 57 - RNA, 20 nt, synthetic construct
  misc_feature 1..20: note = Synthetic
  source 1..20: mol_type = other RNA
gcgcgtggtcccgtgtcccg

SEQ ID NO: 58 - RNA, 20 nt, synthetic construct
  misc_feature 1..20: note = Synthetic
  source 1..20: mol_type = other RNA
gtacgctggcgtctcaccaa

SEQ ID NO: 59 - RNA, 20 nt, synthetic construct
  misc_feature 1..20: note = Synthetic
  source 1..20: mol_type = other RNA
gttctcgaacagtctcccca

SEQ ID NO: 60 - RNA, 20 nt, synthetic construct
  misc_feature 1..20: note = Synthetic
  source 1..20: mol_type = other RNA
tcaaaccaaacacttcccgt

SEQ ID NO: 61 - RNA, 20 nt, synthetic construct
  misc_feature 1..20: note = Synthetic
  source 1..20: mol_type = other RNA
gcacctcgtacgatgccaac

SEQ ID NO: 62 - RNA, 20 nt, synthetic construct
  misc_feature 1..20: note = Synthetic
  source 1..20: mol_type = other RNA
gcttgtggcagaccagtcga

SEQ ID NO: 63 - RNA, 20 nt, synthetic construct
  misc_feature 1..20: note = Synthetic
  source 1..20: mol_type = other RNA
ggtttccacatagcggtgac

SEQ ID NO: 64 - RNA, 20 nt, synthetic construct
  misc_feature 1..20: note = Synthetic
  source 1..20: mol_type = other RNA
gccgcttccggaaaccgacc

SEQ ID NO: 65 - RNA, 20 nt, synthetic construct
  misc_feature 1..20: note = Synthetic
  source 1..20: mol_type = other RNA
gcttcacgctccagaacgtg

SEQ ID NO: 66 - RNA, 20 nt, synthetic construct
  misc_feature 1..20: note = Synthetic
  source 1..20: mol_type = other RNA
cggcttcacgctccagaacg

SEQ ID NO: 67 - RNA, 20 nt, synthetic construct
  misc_feature 1..20: note = Synthetic
  source 1..20: mol_type = other RNA
ctggccgtgtcggacgcact

SEQ ID NO: 68 - RNA, 20 nt, synthetic construct
  misc_feature 1..20: note = Synthetic
  source 1..20: mol_type = other RNA
cttgcgccttccgaacccct

SEQ ID NO: 69 - RNA, 20 nt, synthetic construct
  misc_feature 1..20: note = Synthetic
  source 1..20: mol_type = other RNA
ggtgagacgccagcgtactt

SEQ ID NO: 70 - RNA, 20 nt, synthetic construct
  misc_feature 1..20: note = Synthetic
  source 1..20: mol_type = other RNA
tgttcgagaacgtgcggtgg

SEQ ID NO: 71 - RNA, 20 nt, synthetic construct
  misc_feature 1..20: note = Synthetic
  source 1..20: mol_type = other RNA
aaccaaacacttcccgtggg

SEQ ID NO: 72 - RNA, 20 nt, synthetic construct
  misc_feature 1..20: note = Synthetic
  source 1..20: mol_type = other RNA
gtgtaccggcacctctggtg

SEQ ID NO: 73 - RNA, 20 nt, synthetic construct
  misc_feature 1..20: note = Synthetic
  source 1..20: mol_type = other RNA
ggtgtaccggcacctctggt

SEQ ID NO: 74 - RNA, 20 nt, synthetic construct
  misc_feature 1..20: note = Synthetic
  source 1..20: mol_type = other RNA
gtcatccacgatgaacagaa

SEQ ID NO: 75 - RNA, 20 nt, synthetic construct
  misc_feature 1..20: note = Synthetic
  source 1..20: mol_type = other RNA
ccggccccttctgttcatcg

SEQ ID NO: 76 - RNA, 20 nt, synthetic construct
  misc_feature 1..20: note = Synthetic
  source 1..20: mol_type = other RNA
tccgctttcccagtcggccg

SEQ ID NO: 77 - RNA, 20 nt, synthetic construct
  misc_feature 1..20: note = Synthetic
  source 1..20: mol_type = other RNA
aatcggcagggcgacgtcgg

SEQ ID NO: 78 - RNA, 20 nt, synthetic construct
  misc_feature 1..20: note = Synthetic
  source 1..20: mol_type = other RNA
cggaatcggcagggcgacgt

SEQ ID NO: 79 - RNA, 20 nt, synthetic construct
  misc_feature 1..20: note = Synthetic
  source 1..20: mol_type = other RNA
ggtggcgaggcgctcgctgg

SEQ ID NO: 80 - RNA, 20 nt, synthetic construct
  misc_feature 1..20: note = Synthetic
  source 1..20: mol_type = other RNA
gcgcccgagtgcgtccgaca

SEQ ID NO: 81 - RNA, 20 nt, synthetic construct
  misc_feature 1..20: note = Synthetic
  source 1..20: mol_type = other RNA
aatgcagcgagctgtgcccg

SEQ ID NO: 82 - RNA, 20 nt, synthetic construct
  misc_feature 1..20: note = Synthetic
  source 1..20: mol_type = other RNA
ccgctgtttcacttcgatgt

SEQ ID NO: 83 - RNA, 20 nt, synthetic construct
  misc_feature 1..20: note = Synthetic
  source 1..20: mol_type = other RNA
gaggagtccagtacacgatg

SEQ ID NO: 84 - RNA, 20 nt, synthetic construct
  misc_feature 1..20: note = Synthetic
  source 1..20: mol_type = other RNA
tgtaaactggcactgccggt

SEQ ID NO: 85 - RNA, 20 nt, synthetic construct
  misc_feature 1..20: note = Synthetic
  source 1..20: mol_type = other RNA
catgtggcatgttaaacacg

SEQ ID NO: 86 - RNA, 20 nt, synthetic construct
  misc_feature 1..20: note = Synthetic
  source 1..20: mol_type = other RNA
tcgtaattcagttagcctgg

SEQ ID NO: 87 - RNA, 20 nt, synthetic construct
  misc_feature 1..20: note = Synthetic
  source 1..20: mol_type = other RNA
gctggggtgtttgtacaatc

SEQ ID NO: 88 - RNA, 20 nt, synthetic construct
  misc_feature 1..20: note = Synthetic
  source 1..20: mol_type = other RNA
gggtcgtggacgacgagccc

SEQ ID NO: 89 - RNA, 20 nt, synthetic construct
  misc_feature 1..20: note = Synthetic
  source 1..20: mol_type = other RNA
cctgccgattccgccgcagg

SEQ ID NO: 90 - RNA, 20 nt, synthetic construct
  misc_feature 1..20: note = Synthetic
  source 1..20: mol_type = other RNA
agcctctgcgagggcgtgcg

SEQ ID NO: 91 - RNA, 20 nt, synthetic construct
  misc_feature 1..20: note = Synthetic
  source 1..20: mol_type = other RNA
acgttctggagcgtgaagcc

SEQ ID NO: 92 - RNA, 20 nt, synthetic construct
  misc_feature 1..20: note = Synthetic
  source 1..20: mol_type = other RNA
actcgggcgcccctccgagg

SEQ ID NO: 93 - RNA, 20 nt, synthetic construct
  misc_feature 1..20: note = Synthetic
  source 1..20: mol_type = other RNA
gcaagctgggcagcgacatg

SEQ ID NO: 94 - RNA, 20 nt, synthetic construct
  misc_feature 1..20: note = Synthetic
  source 1..20: mol_type = other RNA
ccaacatcgaagtgaaacag

SEQ ID NO: 95 - RNA, 20 nt, synthetic construct
  misc_feature 1..20: note = Synthetic
  source 1..20: mol_type = other RNA
gaatggattcccaagtacgc

SEQ ID NO: 96 - RNA, 20 nt, synthetic construct
  misc_feature 1..20: note = Synthetic
  source 1..20: mol_type = other RNA
aggagtccagtacacgatga

SEQ ID NO: 97 - RNA, 20 nt, synthetic construct
  misc_feature 1..20: note = Synthetic
  source 1..20: mol_type = other RNA
gtagacgtgcaggatccgtg

SEQ ID NO: 98 - RNA, 20 nt, synthetic construct
  misc_feature 1..20: note = Synthetic
  source 1..20: mol_type = other RNA
gtttcgcagctggcgcgcgg

SEQ ID NO: 99 - RNA, 20 nt, synthetic construct
  misc_feature 1..20: note = Synthetic
  source 1..20: mol_type = other RNA
agaaaaggggcgcgtgtacg

SEQ ID NO: 100 - RNA, 20 nt, synthetic construct
  misc_feature 1..20: note = Synthetic
  source 1..20: mol_type = other RNA
cggagccactgcttctatcg

SEQ ID NO: 101 - RNA, 20 nt, synthetic construct
  misc_feature 1..20: note = Synthetic
  source 1..20: mol_type = other RNA
tcgtctacgcgggcggccgg

SEQ ID NO: 102 - RNA, 20 nt, synthetic construct
  misc_feature 1..20: note = Synthetic
  source 1..20: mol_type = other RNA
gtaattccgtctgcgtccgg

SEQ ID NO: 103 - RNA, 20 nt, synthetic construct
  misc_feature 1..20: note = Synthetic
  source 1..20: mol_type = other RNA
ggactggtccaagagctgcg

SEQ ID NO: 104 - RNA, 20 nt, synthetic construct
  misc_feature 1..20: note = Synthetic
  source 1..20: mol_type = other RNA
cgaaacccccgcgtccacac

SEQ ID NO: 105 - RNA, 20 nt, synthetic construct
  misc_feature 1..20: note = Synthetic
  source 1..20: mol_type = other RNA
ctgcacgtctacacccgcga

SEQ ID NO: 106 - RNA, 20 nt, synthetic construct
  misc_feature 1..20: note = Synthetic
  source 1..20: mol_type = other RNA
cctggagcgagatggttcgg

SEQ ID NO: 107 - RNA, 20 nt, synthetic construct
  misc_feature 1..20: note = Synthetic
  source 1..20: mol_type = other RNA
gccatgattcaggtgaccga

SEQ ID NO: 108 - RNA, 20 nt, synthetic construct
  misc_feature 1..20: note = Synthetic
  source 1..20: mol_type = other RNA
acaacggacgctactgcaca

SEQ ID NO: 109 - RNA, 20 nt, synthetic construct
  misc_feature 1..20: note = Synthetic
  source 1..20: mol_type = other RNA
tggatgtctgtgctcgcctg

SEQ ID NO: 110 - RNA, 20 nt, synthetic construct
  misc_feature 1..20: note = Synthetic
  source 1..20: mol_type = other RNA
atggcgcggttgtatggccg

SEQ ID NO: 111 - RNA, 20 nt, synthetic construct
  misc_feature 1..20: note = Synthetic
  source 1..20: mol_type = other RNA
tggctgacgcgtccatggcg

SEQ ID NO: 112 - RNA, 20 nt, synthetic construct
  misc_feature 1..20: note = Synthetic
  source 1..20: mol_type = other RNA
aacccccgcgtccacaccgg

SEQ ID NO: 113 - RNA, 20 nt, synthetic construct
  misc_feature 1..20: note = Synthetic
  source 1..20: mol_type = other RNA
ctggagcgagatggttcggt

SEQ ID NO: 114 - RNA, 20 nt, synthetic construct
  misc_feature 1..20: note = Synthetic
  source 1..20: mol_type = other RNA
atcgaccaactctactccgg

SEQ ID NO: 115 - RNA, 20 nt, synthetic construct
  misc_feature 1..20: note = Synthetic
  source 1..20: mol_type = other RNA
catgggctactctgccacga

SEQ ID NO: 116 - RNA, 20 nt, synthetic construct
  misc_feature 1..20: note = Synthetic
  source 1..20: mol_type = other RNA
ctatagcggttggagccaca

SEQ ID NO: 117 - RNA, 20 nt, synthetic construct
  misc_feature 1..20: note = Synthetic
  source 1..20: mol_type = other RNA
acgtggtgaggattcctgaa

SEQ ID NO: 118 - RNA, 20 nt, synthetic construct
  misc_feature 1..20: note = Synthetic
  source 1..20: mol_type = other RNA
cagtaagggttacactgacg

SEQ ID NO: 119 - RNA, 20 nt, synthetic construct
  misc_feature 1..20: note = Synthetic
  source 1..20: mol_type = other RNA
acttgggagcagcgtaccat

SEQ ID NO: 120 - RNA, 20 nt, synthetic construct
  misc_feature 1..20: note = Synthetic
  source 1..20: mol_type = other RNA
gcggtggaagggacgccttg

SEQ ID NO: 121 - RNA, 20 nt, synthetic construct
  misc_feature 1..20: note = Synthetic
  source 1..20: mol_type = other RNA
tggtgtgctgtggtacgcca

SEQ ID NO: 122 - RNA, 20 nt, synthetic construct
  misc_feature 1..20: note = Synthetic
  source 1..20: mol_type = other RNA
tggcatcgtaggtctgtcct

SEQ ID NO: 123 - RNA, 20 nt, synthetic construct
  misc_feature 1..20: note = Synthetic
  source 1..20: mol_type = other RNA
ccggccatacaaccgcgcca

SEQ ID NO: 124 - RNA, 20 nt, synthetic construct
  misc_feature 1..20: note = Synthetic
  source 1..20: mol_type = other RNA
tccgctctctcgcccgctgg

SEQ ID NO: 125 - RNA, 20 nt, synthetic construct
  misc_feature 1..20: note = Synthetic
  source 1..20: mol_type = other RNA
ccggcgcacagcaacccgag

SEQ ID NO: 126 - RNA, 20 nt, synthetic construct
  misc_feature 1..20: note = Synthetic
  source 1..20: mol_type = other RNA
tgtacggggatgggtccgca

SEQ ID NO: 127 - RNA, 20 nt, synthetic construct
  misc_feature 1..20: note = Synthetic
  source 1..20: mol_type = other RNA
agtaattccgtctgcgtccg

SEQ ID NO: 128 - RNA, 20 nt, synthetic construct
  misc_feature 1..20: note = Synthetic
  source 1..20: mol_type = other RNA
gtactccgtgtgtcccggca

SEQ ID NO: 129 - RNA, 20 nt, synthetic construct
  misc_feature 1..20: note = Synthetic
  source 1..20: mol_type = other RNA
tctggtggctgacgcgtcca

SEQ ID NO: 130 - RNA, 20 nt, synthetic construct
  misc_feature 1..20: note = Synthetic
  source 1..20: mol_type = other RNA
ccagtgctgcgcgtccgctc

SEQ ID NO: 131 - RNA, 20 nt, synthetic construct
  misc_feature 1..20: note = Synthetic
  source 1..20: mol_type = other RNA
gtgcgccggagcatgctcgt

SEQ ID NO: 132 - RNA, 20 nt, synthetic construct
  misc_feature 1..20: note = Synthetic
  source 1..20: mol_type = other RNA
atgctcgtgggcctccggtg

SEQ ID NO: 133 - RNA, 20 nt, synthetic construct
  misc_feature 1..20: note = Synthetic
  source 1..20: mol_type = other RNA
gaagaaaaggggcgcgtgta

SEQ ID NO: 134 - RNA, 20 nt, synthetic construct
  misc_feature 1..20: note = Synthetic
  source 1..20: mol_type = other RNA
accctaaagccactgctgcg

SEQ ID NO: 135 - RNA, 20 nt, synthetic construct
  misc_feature 1..20: note = Synthetic
  source 1..20: mol_type = other RNA
ggctacctcgtctacgcggg

SEQ ID NO: 136 - RNA, 20 nt, synthetic construct
  misc_feature 1..20: note = Synthetic
  source 1..20: mol_type = other RNA
ggtgggctacctcgtctacg

SEQ ID NO: 137 - RNA, 20 nt, synthetic construct
  misc_feature 1..20: note = Synthetic
  source 1..20: mol_type = other RNA
ctactccggcggcggcaagg

SEQ ID NO: 138 - RNA, 20 nt, synthetic construct
  misc_feature 1..20: note = Synthetic
  source 1..20: mol_type = other RNA
actatagcggttggagccac

SEQ ID NO: 139 - RNA, 20 nt, synthetic construct
  misc_feature 1..20: note = Synthetic
  source 1..20: mol_type = other RNA
cttgggagcagcgtaccatt

SEQ ID NO: 140 - RNA, 20 nt, synthetic construct
  misc_feature 1..20: note = Synthetic
  source 1..20: mol_type = other RNA
gggagcagcgtaccattggg

SEQ ID NO: 141 - RNA, 20 nt, synthetic construct
  misc_feature 1..20: note = Synthetic
  source 1..20: mol_type = other RNA
aacaacggacgctactgcac

SEQ ID NO: 142 - RNA, 20 nt, synthetic construct
  misc_feature 1..20: note = Synthetic
  source 1..20: mol_type = other RNA
acgtcaagccatggcaactg

SEQ ID NO: 143 - RNA, 20 nt, synthetic construct
  misc_feature 1..20: note = Synthetic
  source 1..20: mol_type = other RNA
ctatttcagacgtcaagcca

SEQ ID NO: 144 - RNA, 20 nt, synthetic construct
  misc_feature 1..20: note = Synthetic
  source 1..20: mol_type = other RNA
agtactcaggcccgaatgtc

SEQ ID NO: 145 - RNA, 20 nt, synthetic construct
  misc_feature 1..20: note = Synthetic
  source 1..20: mol_type = other RNA
cgacgcgacatccaaccgag

SEQ ID NO: 146 - RNA, 20 nt, synthetic construct
  misc_feature 1..20: note = Synthetic
  source 1..20: mol_type = other RNA
cgctcggttggatgtcgcgt

SEQ ID NO: 147 - RNA, 20 nt, synthetic construct
  misc_feature 1..20: note = Synthetic
  source 1..20: mol_type = other RNA
tcacgtcagcgagcccggtg

SEQ ID NO: 148 - RNA, 20 nt, synthetic construct
  misc_feature 1..20: note = Synthetic
  source 1..20: mol_type = other RNA
gcgcttgactcggatgcggg

SEQ ID NO: 149 - RNA, 20 nt, synthetic construct
  misc_feature 1..20: note = Synthetic
  source 1..20: mol_type = other RNA
ctgccgcttcgggacgtgca

SEQ ID NO: 150 - RNA, 20 nt, synthetic construct
  misc_feature 1..20: note = Synthetic
  source 1..20: mol_type = other RNA
cttcacgtcagcgagcccgg

SEQ ID NO: 151 - RNA, 20 nt, synthetic construct
  misc_feature 1..20: note = Synthetic
  source 1..20: mol_type = other RNA
gtagcgcttgactcggatgc

SEQ ID NO: 152 - RNA, 20 nt, synthetic construct
  misc_feature 1..20: note = Synthetic
  source 1..20: mol_type = other RNA
gcaccgtgcacgtcccgaag

SEQ ID NO: 153 - RNA, 20 nt, synthetic construct
  misc_feature 1..20: note = Synthetic
  source 1..20: mol_type = other RNA
ctaggaaggcgagcgaaccc

SEQ ID NO: 154 - RNA, 20 nt, synthetic construct
  misc_feature 1..20: note = Synthetic
  source 1..20: mol_type = other RNA
acaaggacaacgtcgccccc

SEQ ID NO: 155 - RNA, 20 nt, synthetic construct
  misc_feature 1..20: note = Synthetic
  source 1..20: mol_type = other RNA
tggggagcacttccactcgg

SEQ ID NO: 156 - RNA, 20 nt, synthetic construct
  misc_feature 1..20: note = Synthetic
  source 1..20: mol_type = other RNA
agcggtgtcagcgcctagga

SEQ ID NO: 157 - RNA, 20 nt, synthetic construct
  misc_feature 1..20: note = Synthetic
  source 1..20: mol_type = other RNA
attcggccccaggacatgaa

SEQ ID NO: 158 - RNA, 20 nt, synthetic construct
  misc_feature 1..20: note = Synthetic
  source 1..20: mol_type = other RNA
cctgtcttcggggcttcgag

SEQ ID NO: 159 - RNA, 20 nt, synthetic construct
  misc_feature 1..20: note = Synthetic
  source 1..20: mol_type = other RNA
gtggggagcacttccactcg

SEQ ID NO: 160 - RNA, 20 nt, synthetic construct
  misc_feature 1..20: note = Synthetic
  source 1..20: mol_type = other RNA
gagcgaacccaggtacatca

SEQ ID NO: 161 - RNA, 20 nt, synthetic construct
  misc_feature 1..20: note = Synthetic
  source 1..20: mol_type = other RNA
tcctaggcgctgacaccgct

SEQ ID NO: 162 - RNA, 20 nt, synthetic construct
  misc_feature 1..20: note = Synthetic
  source 1..20: mol_type = other RNA
aggcgctgacaccgctcggt

SEQ ID NO: 163 - RNA, 20 nt, synthetic construct
  misc_feature 1..20: note = Synthetic
  source 1..20: mol_type = other RNA
caccgggctcgctgacgtga

SEQ ID NO: 164 - RNA, 20 nt, synthetic construct
  misc_feature 1..20: note = Synthetic
  source 1..20: mol_type = other RNA
ggtagcgcttgactcggatg

SEQ ID NO: 165 - RNA, 20 nt, synthetic construct
  misc_feature 1..20: note = Synthetic
  source 1..20: mol_type = other RNA
agggcgtagttacctgtctt

SEQ ID NO: 166 - RNA, 20 nt, synthetic construct
  misc_feature 1..20: note = Synthetic
  source 1..20: mol_type = other RNA
cgccggcggccgtagccctg

SEQ ID NO: 167 - RNA, 20 nt, synthetic construct
  misc_feature 1..20: note = Synthetic
  source 1..20: mol_type = other RNA
tccgtcgccctgatgtacct

SEQ ID NO: 168 - RNA, 20 nt, synthetic construct
  misc_feature 1..20: note = Synthetic
  source 1..20: mol_type = other RNA
ttcacgtcagcgagcccggt

SEQ ID NO: 169 - RNA, 20 nt, synthetic construct
  misc_feature 1..20: note = Synthetic
  source 1..20: mol_type = other RNA
ggcgtagttacctgtcttcg

SEQ ID NO: 170 - RNA, 20 nt, synthetic construct
  misc_feature 1..20: note = Synthetic
  source 1..20: mol_type = other RNA
catccggactgctgcgggcg

SEQ ID NO: 171 - RNA, 20 nt, synthetic construct
  misc_feature 1..20: note = Synthetic
  source 1..20: mol_type = other RNA
tctggcggtagcgcttgact

SEQ ID NO: 172 - RNA, 20 nt, synthetic construct
  misc_feature 1..20: note = Synthetic
  source 1..20: mol_type = other RNA
accgagcggtgtcagcgcct

SEQ ID NO: 173 - RNA, 20 nt, synthetic construct
  misc_feature 1..20: note = Synthetic
  source 1..20: mol_type = other RNA
cctggggccgaataagggtc

SEQ ID NO: 174 - RNA, 20 nt, synthetic construct
  misc_feature 1..20: note = Synthetic
  source 1..20: mol_type = other RNA
ccagacccttattcggcccc

SEQ ID NO: 175 - RNA, 20 nt, synthetic construct
  misc_feature 1..20: note = Synthetic
  source 1..20: mol_type = other RNA
tattcggccccaggacatga

SEQ ID NO: 176 - RNA, 20 nt, synthetic construct
  misc_feature 1..20: note = Synthetic
  source 1..20: mol_type = other RNA
gcgccggcggccgtagccct

SEQ ID NO: 177 - RNA, 20 nt, synthetic construct
  misc_feature 1..20: note = Synthetic
  source 1..20: mol_type = other RNA
ttctaagccacaagcacacg

SEQ ID NO: 178 - RNA, 20 nt, synthetic construct
  misc_feature 1..20: note = Synthetic
  source 1..20: mol_type = other RNA
gggagcacttccactcgggg

SEQ ID NO: 179 - RNA, 20 nt, synthetic construct
  misc_feature 1..20: note = Synthetic
  source 1..20: mol_type = other RNA
acccaggtacatcagggcga

SEQ ID NO: 180 - RNA, 20 nt, synthetic construct
  misc_feature 1..20: note = Synthetic
  source 1..20: mol_type = other RNA
ataagtgggctctgagtcgt

SEQ ID NO: 181 - RNA, 20 nt, synthetic construct
  misc_feature 1..20: note = Synthetic
  source 1..20: mol_type = other RNA
ctggggccgaataagggtct

SEQ ID NO: 182 - RNA, 20 nt, synthetic construct
  misc_feature 1..20: note = Synthetic
  source 1..20: mol_type = other RNA
atccggactgctgcgggcgg

SEQ ID NO: 183 - RNA, 20 nt, synthetic construct
  misc_feature 1..20: note = Synthetic
  source 1..20: mol_type = other RNA
actcggatgcgggcggcatc

SEQ ID NO: 184 - RNA, 20 nt, synthetic construct
  misc_feature 1..20: note = Synthetic
  source 1..20: mol_type = other RNA
agcggcagccaaagctccgg

SEQ ID NO: 185 - RNA, 20 nt, synthetic construct
  misc_feature 1..20: note = Synthetic
  source 1..20: mol_type = other RNA
ggccttcacgtcagcgagcc

SEQ ID NO: 186 - RNA, 20 nt, synthetic construct
  misc_feature 1..20: note = Synthetic
  source 1..20: mol_type = other RNA
tcatgtcctggggccgaata

SEQ ID NO: 187 - RNA, 20 nt, synthetic construct
  misc_feature 1..20: note = Synthetic
  source 1..20: mol_type = other RNA
caccagagtccgacccgggc

SEQ ID NO: 188 - RNA, 20 nt, synthetic construct
  misc_feature 1..20: note = Synthetic
  source 1..20: mol_type = other RNA
agtggggagcacttccactc

SEQ ID NO: 189 - RNA, 20 nt, synthetic construct
  misc_feature 1..20: note = Synthetic
  source 1..20: mol_type = other RNA
ttccgtcgccctgatgtacc

SEQ ID NO: 190 - RNA, 20 nt, synthetic construct
  misc_feature 1..20: note = Synthetic
  source 1..20: mol_type = other RNA
cagagcccacttattccacc

SEQ ID NO: 191 - RNA, 20 nt, synthetic construct
  misc_feature 1..20: note = Synthetic
  source 1..20: mol_type = other RNA
aataagtgggctctgagtcg

SEQ ID NO: 192 - RNA, 20 nt, synthetic construct
  misc_feature 1..20: note = Synthetic
  source 1..20: mol_type = other RNA
catgtcctggggccgaataa

SEQ ID NO: 193 - RNA, 20 nt, synthetic construct
  misc_feature 1..20: note = Synthetic
  source 1..20: mol_type = other RNA
gctgtgctgtggttccgtga

SEQ ID NO: 194 - RNA, 20 nt, synthetic construct
  misc_feature 1..20: note = Synthetic
  source 1..20: mol_type = other RNA
caggaacggccgcccgtgga

SEQ ID NO: 195 - RNA, 20 nt, synthetic construct
  misc_feature 1..20: note = Synthetic
  source 1..20: mol_type = other RNA
gcggccgttcctgatgccgt

SEQ ID NO: 196 - RNA, 20 nt, synthetic construct
  misc_feature 1..20: note = Synthetic
  source 1..20: mol_type = other RNA
gccaaggcctgcgtagtaca

SEQ ID NO: 197 - RNA, 20 nt, synthetic construct
  misc_feature 1..20: note = Synthetic
  source 1..20: mol_type = other RNA
tacctaggactcgttctccg

SEQ ID NO: 198 - RNA, 20 nt, synthetic construct
  misc_feature 1..20: note = Synthetic
  source 1..20: mol_type = other RNA
gcatcaggaacggccgcccg

SEQ ID NO: 199 - RNA, 20 nt, synthetic construct
  misc_feature 1..20: note = Synthetic
  source 1..20: mol_type = other RNA
gtagacaacaataccacgtg

SEQ ID NO: 200 - RNA, 20 nt, synthetic construct
  misc_feature 1..20: note = Synthetic
  source 1..20: mol_type = other RNA
tatcatcgtagccaatgtgc

SEQ ID NO: 201 - RNA, 20 nt, synthetic construct
  misc_feature 1..20: note = Synthetic
  source 1..20: mol_type = other RNA
atcgtagccaatgtgccgga

SEQ ID NO: 202 - RNA, 20 nt, synthetic construct
  misc_feature 1..20: note = Synthetic
  source 1..20: mol_type = other RNA
ggtcatcccagtccactcgg

SEQ ID NO: 203 - RNA, 20 nt, synthetic construct
  misc_feature 1..20: note = Synthetic
  source 1..20: mol_type = other RNA
tgaccgctggatcaacgatg

SEQ ID NO: 204 - RNA, 20 nt, synthetic construct
  misc_feature 1..20: note = Synthetic
  source 1..20: mol_type = other RNA
atcatcaggcgacgccctgg

SEQ ID NO: 205 - RNA, 20 nt, synthetic construct
  misc_feature 1..20: note = Synthetic
  source 1..20: mol_type = other RNA
tctttttaaggcaccgcacg

SEQ ID NO: 206 - RNA, 20 nt, synthetic construct
  misc_feature 1..20: note = Synthetic
  source 1..20: mol_type = other RNA
agcacttcgacatttgccca

SEQ ID NO: 207 - RNA, 20 nt, synthetic construct
  misc_feature 1..20: note = Synthetic
  source 1..20: mol_type = other RNA
cgttgggaccatctcgcgcc

SEQ ID NO: 208 - RNA, 20 nt, synthetic construct
  misc_feature 1..20: note = Synthetic
  source 1..20: mol_type = other RNA
ttctgattcaccagtgagcg

SEQ ID NO: 209 - RNA, 20 nt, synthetic construct
  misc_feature 1..20: note = Synthetic
  source 1..20: mol_type = other RNA
gtggataactcctcgctcac

SEQ ID NO: 210 - RNA, 20 nt, synthetic construct
  misc_feature 1..20: note = Synthetic
  source 1..20: mol_type = other RNA
cagcaaaccttccggcacat

SEQ ID NO: 211 - RNA, 20 nt, synthetic construct
  misc_feature 1..20: note = Synthetic
  source 1..20: mol_type = other RNA
cgcccgtggagggtcaatca

SEQ ID NO: 212 - RNA, 20 nt, synthetic construct
  misc_feature 1..20: note = Synthetic
  source 1..20: mol_type = other RNA
tcaggaacggccgcccgtgg

SEQ ID NO: 213 - RNA, 20 nt, synthetic construct
  misc_feature 1..20: note = Synthetic
  source 1..20: mol_type = other RNA
catgattgaccctccacggg

SEQ ID NO: 214 - RNA, 20 nt, synthetic construct
  misc_feature 1..20: note = Synthetic
  source 1..20: mol_type = other RNA
caaacattccactaccactg

SEQ ID NO: 215 - RNA, 20 nt, synthetic construct
  misc_feature 1..20: note = Synthetic
  source 1..20: mol_type = other RNA
gaatgagcggctgatcagca

SEQ ID NO: 216 - RNA, 20 nt, synthetic construct
  misc_feature 1..20: note = Synthetic
  source 1..20: mol_type = other RNA
gctgagatcctggcgcgaga

SEQ ID NO: 217 - RNA, 20 nt, synthetic construct
  misc_feature 1..20: note = Synthetic
  source 1..20: mol_type = other RNA
gtggtattgttgtctacact

SEQ ID NO: 218 - RNA, 20 nt, synthetic construct
  misc_feature 1..20: note = Synthetic
  source 1..20: mol_type = other RNA
gacacttactgccaaacgca

SEQ ID NO: 219 - RNA, 20 nt, synthetic construct
  misc_feature 1..20: note = Synthetic
  source 1..20: mol_type = other RNA
tgttggggctccgatgtgtt

SEQ ID NO: 220 - RNA, 20 nt, synthetic construct
  misc_feature 1..20: note = Synthetic
  source 1..20: mol_type = other RNA
caccacgatactgacgaaga

SEQ ID NO: 221 - RNA, 20 nt, synthetic construct
  misc_feature 1..20: note = Synthetic
  source 1..20: mol_type = other RNA
agaggatcaacttacttgag

SEQ ID NO: 222 - RNA, 20 nt, synthetic construct
  misc_feature 1..20: note = Synthetic
  source 1..20: mol_type = other RNA
aatgcccataattaccgcca

SEQ ID NO: 223 - RNA, 20 nt, synthetic construct
  misc_feature 1..20: note = Synthetic
  source 1..20: mol_type = other RNA
ctcatcatcaggcgacgccc

SEQ ID NO: 224 - RNA, 20 nt, synthetic construct
  misc_feature 1..20: note = Synthetic
  source 1..20: mol_type = other RNA
gacaaagcgtctggtacctg

SEQ ID NO: 225 - RNA, 20 nt, synthetic construct
  misc_feature 1..20: note = Synthetic
  source 1..20: mol_type = other RNA
tatccacatcatcacgggtg

SEQ ID NO: 226 - RNA, 20 nt, synthetic construct
  misc_feature 1..20: note = Synthetic
  source 1..20: mol_type = other RNA
tgatgaagggcgccccagaa

SEQ ID NO: 227 - RNA, 20 nt, synthetic construct
  misc_feature 1..20: note = Synthetic
  source 1..20: mol_type = other RNA
tctggggtagggtgctatcg

SEQ ID NO: 228 - RNA, 20 nt, synthetic construct
  misc_feature 1..20: note = Synthetic
  source 1..20: mol_type = other RNA
tcacctgttgggcctccgag

SEQ ID NO: 229 - RNA, 20 nt, synthetic construct
  misc_feature 1..20: note = Synthetic
  source 1..20: mol_type = other RNA
acgatgtggaagacagctac

SEQ ID NO: 230 - RNA, 20 nt, synthetic construct
  misc_feature 1..20: note = Synthetic
  source 1..20: mol_type = other RNA
cagaggatcaacttacttga

SEQ ID NO: 231 - RNA, 20 nt, synthetic construct
  misc_feature 1..20: note = Synthetic
  source 1..20: mol_type = other RNA
ctccaaataggcgttctgaa

SEQ ID NO: 232 - RNA, 20 nt, synthetic construct
  misc_feature 1..20: note = Synthetic
  source 1..20: mol_type = other RNA
atcactgccgtgtactacgc

SEQ ID NO: 233 - RNA, 20 nt, synthetic construct
  misc_feature 1..20: note = Synthetic
  source 1..20: mol_type = other RNA
ctctactccagtcacaattg

SEQ ID NO: 234 - RNA, 20 nt, synthetic construct
  misc_feature 1..20: note = Synthetic
  source 1..20: mol_type = other RNA
gagtggactgggatgaccgc

SEQ ID NO: 235 - RNA, 20 nt, synthetic construct
  misc_feature 1..20: note = Synthetic
  source 1..20: mol_type = other RNA
ccagaggatcaacttacttg

SEQ ID NO: 236 - RNA, 20 nt, synthetic construct
  misc_feature 1..20: note = Synthetic
  source 1..20: mol_type = other RNA
gaatgcccataattaccgcc

SEQ ID NO: 237 - RNA, 20 nt, synthetic construct
  misc_feature 1..20: note = Synthetic
  source 1..20: mol_type = other RNA
ctcaccatttcgaatcacaa

SEQ ID NO: 238 - RNA, 20 nt, synthetic construct
  misc_feature 1..20: note = Synthetic
  source 1..20: mol_type = other RNA
aggcaatgttcctcgtctcc

SEQ ID NO: 239 - RNA, 20 nt, synthetic construct
  misc_feature 1..20: note = Synthetic
  source 1..20: mol_type = other RNA
cgtggtattgttgtctacac

SEQ ID NO: 240 - RNA, 20 nt, synthetic construct
  misc_feature 1..20: note = Synthetic
  source 1..20: mol_type = other RNA
cctcaagccaggtgtactca

SEQ ID NO: 241 - RNA, 20 nt, synthetic construct
  misc_feature 1..20: note = Synthetic
  source 1..20: mol_type = other RNA
gaactacccagtcgtacgtg

SEQ ID NO: 242 - RNA, 20 nt, synthetic construct
  misc_feature 1..20: note = Synthetic
  source 1..20: mol_type = other RNA
acacgctcagctcccctcgg

SEQ ID NO: 243 - RNA, 20 nt, synthetic construct
  misc_feature 1..20: note = Synthetic
  source 1..20: mol_type = other RNA
aactacccagtcgtacgtgc

SEQ ID NO: 244 - RNA, 20 nt, synthetic construct
  misc_feature 1..20: note = Synthetic
  source 1..20: mol_type = other RNA
tattagtgagtgggtaacgg

SEQ ID NO: 245 - RNA, 20 nt, synthetic construct
  misc_feature 1..20: note = Synthetic
  source 1..20: mol_type = other RNA
tcatgccatacagaagcgtg

SEQ ID NO: 246 - RNA, 20 nt, synthetic construct
  misc_feature 1..20: note = Synthetic
  source 1..20: mol_type = other RNA
ggtagacgccaaaacatgtg

SEQ ID NO: 247 - RNA, 20 nt, synthetic construct
  misc_feature 1..20: note = Synthetic
  source 1..20: mol_type = other RNA
aagggcccgcacgtacgact

SEQ ID NO: 248 - RNA, 20 nt, synthetic construct
  misc_feature 1..20: note = Synthetic
  source 1..20: mol_type = other RNA
acgactgggtagttcggcac

SEQ ID NO: 249 - RNA, 20 nt, synthetic construct
  misc_feature 1..20: note = Synthetic
  source 1..20: mol_type = other RNA
cgactgggtagttcggcact

SEQ ID NO: 250 - RNA, 20 nt, synthetic construct
  misc_feature 1..20: note = Synthetic
  source 1..20: mol_type = other RNA
ctctgaccctgcccgccgag

SEQ ID NO: 251 - RNA, 20 nt, synthetic construct
  misc_feature 1..20: note = Synthetic
  source 1..20: mol_type = other RNA
agagtggcgccggaccctca

SEQ ID NO: 252 - RNA, 20 nt, synthetic construct
  misc_feature 1..20: note = Synthetic
  source 1..20: mol_type = other RNA
tcccatgggtccgcacacct

SEQ ID NO: 253 - RNA, 20 nt, synthetic construct
  misc_feature 1..20: note = Synthetic
  source 1..20: mol_type = other RNA
tctacccacacgcttctgta

SEQ ID NO: 254 - RNA, 20 nt, synthetic construct
  misc_feature 1..20: note = Synthetic
  source 1..20: mol_type = other RNA
gtacgtgcgggcccttacca

SEQ ID NO: 255 - RNA, 20 nt, synthetic construct
  misc_feature 1..20: note = Synthetic
  source 1..20: mol_type = other RNA
agtggacatgtcgggcggga

SEQ ID NO: 256 - RNA, 20 nt, synthetic construct
  misc_feature 1..20: note = Synthetic
  source 1..20: mol_type = other RNA
ttgactactgagcatcaccc

SEQ ID NO: 257 - RNA, 20 nt, synthetic construct
  misc_feature 1..20: note = Synthetic
  source 1..20: mol_type = other RNA
tgtgtacctccacgtttcag

SEQ ID NO: 258 - RNA, 20 nt, synthetic construct
  misc_feature 1..20: note = Synthetic
  source 1..20: mol_type = other RNA
cgagaccaagtgcaatccca

SEQ ID NO: 259 - RNA, 20 nt, synthetic construct
  misc_feature 1..20: note = Synthetic
  source 1..20: mol_type = other RNA
actgcagtggacatgtcggg

SEQ ID NO: 260 - RNA, 20 nt, synthetic construct
  misc_feature 1..20: note = Synthetic
  source 1..20: mol_type = other RNA
actctgaccctgcccgccga

SEQ ID NO: 261 - RNA, 20 nt, synthetic construct
  misc_feature 1..20: note = Synthetic
  source 1..20: mol_type = other RNA
acgcagacttgtacacgtcc

SEQ ID NO: 262 - RNA, 20 nt, synthetic construct
  misc_feature 1..20: note = Synthetic
  source 1..20: mol_type = other RNA
gggactctggagagcgtgaa

SEQ ID NO: 263 - RNA, 20 nt, synthetic construct
  misc_feature 1..20: note = Synthetic
  source 1..20: mol_type = other RNA
acccaggtgtgcggacccat

SEQ ID NO: 264 - RNA, 20 nt, synthetic construct
  misc_feature 1..20: note = Synthetic
  source 1..20: mol_type = other RNA
tgttaaattccactgaaacg

SEQ ID NO: 265 - RNA, 20 nt, synthetic construct
  misc_feature 1..20: note = Synthetic
  source 1..20: mol_type = other RNA
catgccatacagaagcgtgt

SEQ ID NO: 266 - RNA, 20 nt, synthetic construct
  misc_feature 1..20: note = Synthetic
  source 1..20: mol_type = other RNA
taagggcccgcacgtacgac

SEQ ID NO: 267 - RNA, 20 nt, synthetic construct
  misc_feature 1..20: note = Synthetic
  source 1..20: mol_type = other RNA
gaattggctggcgattcata

SEQ ID NO: 268 - RNA, 20 nt, synthetic construct
  misc_feature 1..20: note = Synthetic
  source 1..20: mol_type = other RNA
ctgcagtggacatgtcgggc

SEQ ID NO: 269 - RNA, 20 nt, synthetic construct
  misc_feature 1..20: note = Synthetic
  source 1..20: mol_type = other RNA
atgggtccgcacacctgggt

SEQ ID NO: 270 - RNA, 20 nt, synthetic construct
  misc_feature 1..20: note = Synthetic
  source 1..20: mol_type = other RNA
gcacgtacgactgggtagtt

SEQ ID NO: 271 - RNA, 20 nt, synthetic construct
  misc_feature 1..20: note = Synthetic
  source 1..20: mol_type = other RNA
gtcccatgggtccgcacacc

SEQ ID NO: 272 - RNA, 20 nt, synthetic construct
  misc_feature 1..20: note = Synthetic
  source 1..20: mol_type = other RNA
ggattaaccttgtgcactca

SEQ ID NO: 273 - RNA, 20 nt, synthetic construct
  misc_feature 1..20: note = Synthetic
  source 1..20: mol_type = other RNA
tacccaggtgtgcggaccca

SEQ ID NO: 274 - RNA, 20 nt, synthetic construct
  misc_feature 1..20: note = Synthetic
  source 1..20: mol_type = other RNA
gtaacccatgggattgcact

SEQ ID NO: 275 - RNA, 20 nt, synthetic construct
  misc_feature 1..20: note = Synthetic
  source 1..20: mol_type = other RNA
ggactctggagagcgtgaat

SEQ ID NO: 276 - RNA, 20 nt, synthetic construct
  misc_feature 1..20: note = Synthetic
  source 1..20: mol_type = other RNA
gaagcaaacatccgaggaca

SEQ ID NO: 277 - RNA, 20 nt, synthetic construct
  misc_feature 1..20: note = Synthetic
  source 1..20: mol_type = other RNA
acacgtgatagaagagctgt

SEQ ID NO: 278 - RNA, 20 nt, synthetic construct
  misc_feature 1..20: note = Synthetic
  source 1..20: mol_type = other RNA
cacgctctccagagtcccat

SEQ ID NO: 279 - RNA, 20 nt, synthetic construct
  misc_feature 1..20: note = Synthetic
  source 1..20: mol_type = other RNA
gctcagtagtcaagtgcctt

SEQ ID NO: 280 - RNA, 20 nt, synthetic construct
  misc_feature 1..20: note = Synthetic
  source 1..20: mol_type = other RNA
tgtgcggacccatgggactc

SEQ ID NO: 281 - RNA, 20 nt, synthetic construct
  misc_feature 1..20: note = Synthetic
  source 1..20: mol_type = other RNA
cttcattgggccgaactttc

SEQ ID NO: 282 - RNA, 20 nt, synthetic construct
  misc_feature 1..20: note = Synthetic
  source 1..20: mol_type = other RNA
taccgcaccgcttagatctg

SEQ ID NO: 283 - RNA, 20 nt, synthetic construct
  misc_feature 1..20: note = Synthetic
  source 1..20: mol_type = other RNA
ccaaccccaattgcagtttg

SEQ ID NO: 284 - RNA, 20 nt, synthetic construct
  misc_feature 1..20: note = Synthetic
  source 1..20: mol_type = other RNA
catgctgggcacatacacgc

SEQ ID NO: 285 - RNA, 20 nt, synthetic construct
  misc_feature 1..20: note = Synthetic
  source 1..20: mol_type = other RNA
ttctggggcatgctaacatg

SEQ ID NO: 286 - RNA, 20 nt, synthetic construct
  misc_feature 1..20: note = Synthetic
  source 1..20: mol_type = other RNA
ttaccgcaccgcttagatct

SEQ ID NO: 287 - RNA, 20 nt, synthetic construct
  misc_feature 1..20: note = Synthetic
  source 1..20: mol_type = other RNA
aatctgagtacttgcatgct

SEQ ID NO: 288 - RNA, 20 nt, synthetic construct
  misc_feature 1..20: note = Synthetic
  source 1..20: mol_type = other RNA
agccccagatctaagcggtg

SEQ ID NO: 289 - RNA, 20 nt, synthetic construct
  misc_feature 1..20: note = Synthetic
  source 1..20: mol_type = other RNA
cgcttcgtcctcactgagcg

SEQ ID NO: 290 - RNA, 20 nt, synthetic construct
  misc_feature 1..20: note = Synthetic
  source 1..20: mol_type = other RNA
gcatgctaacatgagggcga

SEQ ID NO: 291 - RNA, 20 nt, synthetic construct
  misc_feature 1..20: note = Synthetic
  source 1..20: mol_type = other RNA
aagggatatgtccagcgact

SEQ ID NO: 292 - RNA, 20 nt, synthetic construct
  misc_feature 1..20: note = Synthetic
  source 1..20: mol_type = other RNA
atggtctctctccaagtcgc

SEQ ID NO: 293 - RNA, 20 nt, synthetic construct
  misc_feature 1..20: note = Synthetic
  source 1..20: mol_type = other RNA
gttcccccaaactgcaattg

SEQ ID NO: 294 - RNA, 20 nt, synthetic construct
  misc_feature 1..20: note = Synthetic
  source 1..20: mol_type = other RNA
taatctgagtacttgcatgc

SEQ ID NO: 295 - RNA, 20 nt, synthetic construct
  misc_feature 1..20: note = Synthetic
  source 1..20: mol_type = other RNA
tcgtcctcactgagcgtggc

SEQ ID NO: 296 - RNA, 20 nt, synthetic construct
  misc_feature 1..20: note = Synthetic
  source 1..20: mol_type = other RNA
ggacgaagcgcgcctcctgc

SEQ ID NO: 297 - RNA, 20 nt, synthetic construct
  misc_feature 1..20: note = Synthetic
  source 1..20: mol_type = other RNA
cgtcctcactgagcgtggcc

SEQ ID NO: 298 - RNA, 20 nt, synthetic construct
  misc_feature 1..20: note = Synthetic
  source 1..20: mol_type = other RNA
attaccgcaccgcttagatc

SEQ ID NO: 299 - RNA, 20 nt, synthetic construct
  misc_feature 1..20: note = Synthetic
  source 1..20: mol_type = other RNA
ctccaaccccaattgcagtt

SEQ ID NO: 300 - RNA, 20 nt, synthetic construct
  misc_feature 1..20: note = Synthetic
  source 1..20: mol_type = other RNA
cgttcccccaaactgcaatt

SEQ ID NO: 301 - RNA, 20 nt, synthetic construct
  misc_feature 1..20: note = Synthetic
  source 1..20: mol_type = other RNA
ccccaaactgcaattggggt

SEQ ID NO: 302 - RNA, 20 nt, synthetic construct
  misc_feature 1..20: note = Synthetic
  source 1..20: mol_type = other RNA
cgcgtcctctttactgagtg

SEQ ID NO: 303 - RNA, 20 nt, synthetic construct
  misc_feature 1..20: note = Synthetic
  source 1..20: mol_type = other RNA
tatcttggtcctgtaccagg

SEQ ID NO: 304 - RNA, 20 nt, synthetic construct
  misc_feature 1..20: note = Synthetic
  source 1..20: mol_type = other RNA
acctgaatggcgccgcctgg

SEQ ID NO: 305 - RNA, 20 nt, synthetic construct
  misc_feature 1..20: note = Synthetic
  source 1..20: mol_type = other RNA
tattggctggacctacctga

SEQ ID NO: 306 - RNA, 20 nt, synthetic construct
  misc_feature 1..20: note = Synthetic
  source 1..20: mol_type = other RNA
cccggccacactcagtaaag

SEQ ID NO: 307 - RNA, 20 nt, synthetic construct
  misc_feature 1..20: note = Synthetic
  source 1..20: mol_type = other RNA
cctttacagagaggcggcat

SEQ ID NO: 308 - RNA, 20 nt, synthetic construct
  misc_feature 1..20: note = Synthetic
  source 1..20: mol_type = other RNA
cagccgatgagtcacacagg

SEQ ID NO: 309 - RNA, 20 nt, synthetic construct
  misc_feature 1..20: note = Synthetic
  source 1..20: mol_type = other RNA
aaagaggctaaccttcaggt

SEQ ID NO: 310 - RNA, 20 nt, synthetic construct
  misc_feature 1..20: note = Synthetic
  source 1..20: mol_type = other RNA
cagtatcttggtcctgtacc

SEQ ID NO: 311 - RNA, 20 nt, synthetic construct
  misc_feature 1..20: note = Synthetic
  source 1..20: mol_type = other RNA
atcttggtcctgtaccaggc

SEQ ID NO: 312 - RNA, 20 nt, synthetic construct
  misc_feature 1..20: note = Synthetic
  source 1..20: mol_type = other RNA
tgccagccgatgagtcacac

SEQ ID NO: 313 - RNA, 20 nt, synthetic construct
  misc_feature 1..20: note = Synthetic
  source 1..20: mol_type = other RNA
aggcttgctgagcagatcag

SEQ ID NO: 314 - RNA, 20 nt, synthetic construct
  misc_feature 1..20: note = Synthetic
  source 1..20: mol_type = other RNA
atccttcctttacagagagg

SEQ ID NO: 315 - RNA, 20 nt, synthetic construct
  misc_feature 1..20: note = Synthetic
  source 1..20: mol_type = other RNA
agaggacgcgcgcctcctgc

SEQ ID NO: 316 - RNA, 20 nt, synthetic construct
  misc_feature 1..20: note = Synthetic
  source 1..20: mol_type = other RNA
gctttggaacccacattggt

SEQ ID NO: 317 - RNA, 20 nt, synthetic construct
  misc_feature 1..20: note = Synthetic
  source 1..20: mol_type = other RNA
caacttcgtgcccaccaatg

SEQ ID NO: 318 - RNA, 20 nt, synthetic construct
  misc_feature 1..20: note = Synthetic
  source 1..20: mol_type = other RNA
gtccctgcggcgcctgccaa

SEQ ID NO: 319 - RNA, 20 nt, synthetic construct
  misc_feature 1..20: note = Synthetic
  source 1..20: mol_type = other RNA
gtgggtgttaacattacact

SEQ ID NO: 320 - RNA, 20 nt, synthetic construct
  misc_feature 1..20: note = Synthetic
  source 1..20: mol_type = other RNA
tgtacagattggattccgct

SEQ ID NO: 321 - RNA, 20 nt, synthetic construct
  misc_feature 1..20: note = Synthetic
  source 1..20: mol_type = other RNA
cctacacacactcattgtgg

SEQ ID NO: 322 - RNA, 20 nt, synthetic construct
  misc_feature 1..20: note = Synthetic
  source 1..20: mol_type = other RNA
atccgtgtccaattatggtc

SEQ ID NO: 323 - RNA, 20 nt, synthetic construct
  misc_feature 1..20: note = Synthetic
  source 1..20: mol_type = other RNA
gacataccttcactttctcg

SEQ ID NO: 324 - RNA, 20 nt, synthetic construct
  misc_feature 1..20: note = Synthetic
  source 1..20: mol_type = other RNA
ctgattccatggcgacctga

SEQ ID NO: 325 - RNA, 20 nt, synthetic construct
  misc_feature 1..20: note = Synthetic
  source 1..20: mol_type = other RNA
gcaatggcatgtatacaagc

SEQ ID NO: 326 - RNA, 20 nt, synthetic construct
  misc_feature 1..20: note = Synthetic
  source 1..20: mol_type = other RNA
cgtttactgcaacagaacct

SEQ ID NO: 327 - RNA, 20 nt, synthetic construct
  misc_feature 1..20: note = Synthetic
  source 1..20: mol_type = other RNA
cctgaggactcaattcagtt

SEQ ID NO: 328 - RNA, 20 nt, synthetic construct
  misc_feature 1..20: note = Synthetic
  source 1..20: mol_type = other RNA
ttaggagcctaagttgccaa

SEQ ID NO: 329 - RNA, 20 nt, synthetic construct
  misc_feature 1..20: note = Synthetic
  source 1..20: mol_type = other RNA
tacctgaccataattggaca

SEQ ID NO: 330 - RNA, 20 nt, synthetic construct
  misc_feature 1..20: note = Synthetic
  source 1..20: mol_type = other RNA
cgtgggtgttaacattacac

SEQ ID NO: 331 - RNA, 20 nt, synthetic construct
  misc_feature 1..20: note = Synthetic
  source 1..20: mol_type = other RNA
tgtgagagctactcttatct

SEQ ID NO: 332 - RNA, 20 nt, synthetic construct
  misc_feature 1..20: note = Synthetic
  source 1..20: mol_type = other RNA
gcacatccttatgcacttcc

SEQ ID NO: 333 - RNA, 20 nt, synthetic construct
  misc_feature 1..20: note = Synthetic
  source 1..20: mol_type = other RNA
tgctggaacgatgttgcagc

SEQ ID NO: 334 - RNA, 20 nt, synthetic construct
  misc_feature 1..20: note = Synthetic
  source 1..20: mol_type = other RNA
gcgtttactgcaacagaacc

SEQ ID NO: 335 - RNA, 20 nt, synthetic construct
  misc_feature 1..20: note = Synthetic
  source 1..20: mol_type = other RNA
cactgcagtggccaacaacc

SEQ ID NO: 336 - RNA, 20 nt, synthetic construct
  misc_feature 1..20: note = Synthetic
  source 1..20: mol_type = other RNA
ggctactaaggcctggttgt

SEQ ID NO: 337 - RNA, 20 nt, synthetic construct
  misc_feature 1..20: note = Synthetic
  source 1..20: mol_type = other RNA
gcatcactgcttatctcgct

SEQ ID NO: 338 - RNA, 20 nt, synthetic construct
  misc_feature 1..20: note = Synthetic
  source 1..20: mol_type = other RNA
agacaatccgtgtccaatta

SEQ ID NO: 339 - RNA, 20 nt, synthetic construct
  misc_feature 1..20: note = Synthetic
  source 1..20: mol_type = other RNA
gccatacctggaagtgcata

SEQ ID NO: 340 - RNA, 20 nt, synthetic construct
  misc_feature 1..20: note = Synthetic
  source 1..20: mol_type = other RNA
ggacagtcatgactataacc

SEQ ID NO: 341 - RNA, 20 nt, synthetic construct
  misc_feature 1..20: note = Synthetic
  source 1..20: mol_type = other RNA
cagccaccttcattccccaa

SEQ ID NO: 342 - RNA, 20 nt, synthetic construct
  misc_feature 1..20: note = Synthetic
  source 1..20: mol_type = other RNA
gttataacagcaggtgactg

SEQ ID NO: 343 - RNA, 20 nt, synthetic construct
  misc_feature 1..20: note = Synthetic
  source 1..20: mol_type = other RNA
agcgagcccttggggaatga

SEQ ID NO: 344 - RNA, 20 nt, synthetic construct
  misc_feature 1..20: note = Synthetic
  source 1..20: mol_type = other RNA
ttgcttgtccaggtggtcca

SEQ ID NO: 345 - RNA, 20 nt, synthetic construct
  misc_feature 1..20: note = Synthetic
  source 1..20: mol_type = other RNA
tatgagcagcaggcacagaa

SEQ ID NO: 346 - RNA, 20 nt, synthetic construct
  misc_feature 1..20: note = Synthetic
  source 1..20: mol_type = other RNA
ggcggcagagactttcatgc

SEQ ID NO: 347 - RNA, 20 nt, synthetic construct
  misc_feature 1..20: note = Synthetic
  source 1..20: mol_type = other RNA
tacctggctgagcgagccct

SEQ ID NO: 348 - RNA, 20 nt, synthetic construct
  misc_feature 1..20: note = Synthetic
  source 1..20: mol_type = other RNA
gcagccaccttcattcccca

SEQ ID NO: 349 - RNA, 20 nt, synthetic construct
  misc_feature 1..20: note = Synthetic
  source 1..20: mol_type = other RNA
ataggaagatctcagtgcag

SEQ ID NO: 350 - RNA, 20 nt, synthetic construct
  misc_feature 1..20: note = Synthetic
  source 1..20: mol_type = other RNA
gagcagcaggcacagaaggg

SEQ ID NO: 351 - RNA, 20 nt, synthetic construct
  misc_feature 1..20: note = Synthetic
  source 1..20: mol_type = other RNA
cctggctgagcgagcccttg

SEQ ID NO: 352 - RNA, 20 nt, synthetic construct
  misc_feature 1..20: note = Synthetic
  source 1..20: mol_type = other RNA
acctggctgagcgagccctt

SEQ ID NO: 353 - RNA, 20 nt, synthetic construct
  misc_feature 1..20: note = Synthetic
  source 1..20: mol_type = other RNA
aagttataacagcaggtgac

SEQ ID NO: 354 - RNA, 20 nt, synthetic construct
  misc_feature 1..20: note = Synthetic
  source 1..20: mol_type = other RNA
gagcccttggggaatgaagg

SEQ ID NO: 355 - RNA, 20 nt, synthetic construct
  misc_feature 1..20: note = Synthetic
  source 1..20: mol_type = other RNA
agttataacagcaggtgact

SEQ ID NO: 356 - RNA, 20 nt, synthetic construct
  misc_feature 1..20: note = Synthetic
  source 1..20: mol_type = other RNA
gtgttcaagtcttcggagtt

SEQ ID NO: 357 - RNA, 20 nt, synthetic construct
  misc_feature 1..20: note = Synthetic
  source 1..20: mol_type = other RNA
attggtgaagttataacagc

SEQ ID NO: 358 - RNA, 20 nt, synthetic construct
  misc_feature 1..20: note = Synthetic
  source 1..20: mol_type = other RNA
attctgtggaatctgccggg

SEQ ID NO: 359 - RNA, 20 nt, synthetic construct
  misc_feature 1..20: note = Synthetic
  source 1..20: mol_type = other RNA
cctggagctgagtgcctgag

SEQ ID NO: 360 - RNA, 20 nt, synthetic construct
  misc_feature 1..20: note = Synthetic
  source 1..20: mol_type = other RNA
tctggacccactcctcactg

SEQ ID NO: 361 - RNA, 20 nt, synthetic construct
  misc_feature 1..20: note = Synthetic
  source 1..20: mol_type = other RNA
actggcacttacatgacacc

SEQ ID NO: 362 - RNA, 20 nt, synthetic construct
  misc_feature 1..20: note = Synthetic
  source 1..20: mol_type = other RNA
actcacgtgatgcagagaac

SEQ ID NO: 363 - RNA, 20 nt, synthetic construct
  misc_feature 1..20: note = Synthetic
  source 1..20: mol_type = other RNA
ggtctgtgctgaccccagtg

SEQ ID NO: 364 - RNA, 20 nt, synthetic construct
  misc_feature 1..20: note = Synthetic
  source 1..20: mol_type = other RNA
cctaaccaagcgaagccggc

SEQ ID NO: 365 - RNA, 20 nt, synthetic construct
  misc_feature 1..20: note = Synthetic
  source 1..20: mol_type = other RNA
gactggcacttacatgacac

SEQ ID NO: 366 - RNA, 20 nt, synthetic construct
  misc_feature 1..20: note = Synthetic
  source 1..20: mol_type = other RNA
gtgctgaccccagtgaggag

SEQ ID NO: 367 - RNA, 20 nt, synthetic construct
  misc_feature 1..20: note = Synthetic
  source 1..20: mol_type = other RNA
gcttcctaaccaagcgaagc

SEQ ID NO: 368 - RNA, 20 nt, synthetic construct
  misc_feature 1..20: note = Synthetic
  source 1..20: mol_type = other RNA
acagacctgccggcttcgct

SEQ ID NO: 369 - RNA, 20 nt, synthetic construct
  misc_feature 1..20: note = Synthetic
  source 1..20: mol_type = other RNA
cctgccggcttcgcttggtt

SEQ ID NO: 370 - RNA, 20 nt, synthetic construct
  misc_feature 1..20: note = Synthetic
  source 1..20: mol_type = other RNA
agagagccatggtgcagagg

SEQ ID NO: 371 - RNA, 20 nt, synthetic construct
  misc_feature 1..20: note = Synthetic
  source 1..20: mol_type = other RNA
ggtgcagaggaggacagcaa

SEQ ID NO: 372 - RNA, 20 nt, synthetic construct
  misc_feature 1..20: note = Synthetic
  source 1..20: mol_type = other RNA
tcacctgctcagaatcatgc

SEQ ID NO: 373 - RNA, 20 nt, synthetic construct
  misc_feature 1..20: note = Synthetic
  source 1..20: mol_type = other RNA
tagtcagctatgaaattctg

SEQ ID NO: 374 - RNA, 20 nt, synthetic construct
  misc_feature 1..20: note = Synthetic
  source 1..20: mol_type = other RNA
gaaattctgtggaatctgcc

SEQ ID NO: 375 - RNA, 20 nt, synthetic construct
  misc_feature 1..20: note = Synthetic
  source 1..20: mol_type = other RNA
ctgagactcacacgactgct

SEQ ID NO: 376 - RNA, 20 nt, synthetic construct
  misc_feature 1..20: note = Synthetic
  source 1..20: mol_type = other RNA
aggtaccatgaaggtctccg

SEQ ID NO: 377 - RNA, 20 nt, synthetic construct
  misc_feature 1..20: note = Synthetic
  source 1..20: mol_type = other RNA
tatgactcccggctgaacaa

SEQ ID NO: 378 - RNA, 20 nt, synthetic construct
  misc_feature 1..20: note = Synthetic
  source 1..20: mol_type = other RNA
gtatgactcccggctgaaca

SEQ ID NO: 379 - RNA, 20 nt, synthetic construct
  misc_feature 1..20: note = Synthetic
  source 1..20: mol_type = other RNA
gactcacacgactgctgggt

SEQ ID NO: 380 - RNA, 20 nt, synthetic construct
  misc_feature 1..20: note = Synthetic
  source 1..20: mol_type = other RNA
tactccttgatgtgggcacg

SEQ ID NO: 381 - RNA, 20 nt, synthetic construct
  misc_feature 1..20: note = Synthetic
  source 1..20: mol_type = other RNA
tagcaatgaggatgacagcg

SEQ ID NO: 382 - RNA, 20 nt, synthetic construct
  misc_feature 1..20: note = Synthetic
  source 1..20: mol_type = other RNA
ctgggttggcacacacttgg

SEQ ID NO: 383 - RNA, 20 nt, synthetic construct
  misc_feature 1..20: note = Synthetic
  source 1..20: mol_type = other RNA
tctttggcatccttgacctg

SEQ ID NO: 384 - RNA, 20 nt, synthetic construct
  misc_feature 1..20: note = Synthetic
  source 1..20: mol_type = other RNA
ctctcccacaggtaccatga

SEQ ID NO: 385 - RNA, 20 nt, synthetic construct
  misc_feature 1..20: note = Synthetic
  source 1..20: mol_type = other RNA
taccccacccgctccttgaa

SEQ ID NO: 386 - RNA, 20 nt, synthetic construct
  misc_feature 1..20: note = Synthetic
  source 1..20: mol_type = other RNA
ggtagaatctgggcccttca

SEQ ID NO: 387 - RNA, 20 nt, synthetic construct
  misc_feature 1..20: note = Synthetic
  source 1..20: mol_type = other RNA
tctctgggttggcacacact

SEQ ID NO: 388 - RNA, 20 nt, synthetic construct
  misc_feature 1..20: note = Synthetic
  source 1..20: mol_type = other RNA
atactccttgatgtgggcac

SEQ ID NO: 389 - RNA, 20 nt, synthetic construct
  misc_feature 1..20: note = Synthetic
  source 1..20: mol_type = other RNA
ggtgtggtgtccgaggaatc

SEQ ID NO: 390 - RNA, 20 nt, synthetic construct
  misc_feature 1..20: note = Synthetic
  source 1..20: mol_type = other RNA
tcaagaccaggacttacatg

SEQ ID NO: 391 - RNA, 20 nt, synthetic construct
  misc_feature 1..20: note = Synthetic
  source 1..20: mol_type = other RNA
agaccaggacttacatgggg

SEQ ID NO: 392 - RNA, 20 nt, synthetic construct
  misc_feature 1..20: note = Synthetic
  source 1..20: mol_type = other RNA
acatacattacagcttcccg

SEQ ID NO: 393 - RNA, 20 nt, synthetic construct
  misc_feature 1..20: note = Synthetic
  source 1..20: mol_type = other RNA
gtcctggacccacttctgtg

SEQ ID NO: 394 - RNA, 20 nt, synthetic construct
  misc_feature 1..20: note = Synthetic
  source 1..20: mol_type = other RNA
ccggggacagtggctactgg

SEQ ID NO: 395 - RNA, 20 nt, synthetic construct
  misc_feature 1..20: note = Synthetic
  source 1..20: mol_type = other RNA
cctggacccacttctgtgtg

SEQ ID NO: 396 - RNA, 20 nt, synthetic construct
  misc_feature 1..20: note = Synthetic
  source 1..20: mol_type = other RNA
tcctggacccacttctgtgt

SEQ ID NO: 397 - RNA, 20 nt, synthetic construct
  misc_feature 1..20: note = Synthetic
  source 1..20: mol_type = other RNA
ctggctgagcaagcccctgg

SEQ ID NO: 398 - RNA, 20 nt, synthetic construct
  misc_feature 1..20: note = Synthetic
  source 1..20: mol_type = other RNA
ttacagcttcccggggacag

SEQ ID NO: 399 - RNA, 20 nt, synthetic construct
  misc_feature 1..20: note = Synthetic
  source 1..20: mol_type = other RNA
acagatctccttgtccagtt

SEQ ID NO: 400 - RNA, 20 nt, synthetic construct
  misc_feature 1..20: note = Synthetic
  source 1..20: mol_type = other RNA
caccagtagccactgtcccc

SEQ ID NO: 401 - RNA, 20 nt, synthetic construct
  misc_feature 1..20: note = Synthetic
  source 1..20: mol_type = other RNA
cagctgctttcagcccccag

SEQ ID NO: 402 - RNA, 20 nt, synthetic construct
  misc_feature 1..20: note = Synthetic
  source 1..20: mol_type = other RNA
gtccattgagggtgtgtcct

SEQ ID NO: 403 - RNA, 20 nt, synthetic construct
  misc_feature 1..20: note = Synthetic
  source 1..20: mol_type = other RNA
agtccattgagggtgtgtcc

SEQ ID NO: 404 - RNA, 20 nt, synthetic construct
  misc_feature 1..20: note = Synthetic
  source 1..20: mol_type = other RNA
acaagaagaaaagtccattg

SEQ ID NO: 405 - RNA, 20 nt, synthetic construct
  misc_feature 1..20: note = Synthetic
  source 1..20: mol_type = other RNA
gacccaggacacaccctcaa

SEQ ID NO: 406 - RNA, 20 nt, synthetic construct
  misc_feature 1..20: note = Synthetic
  source 1..20: mol_type = other RNA
ttcccggggacagtggctac

SEQ ID NO: 407 - RNA, 20 nt, synthetic construct
  misc_feature 1..20: note = Synthetic
  source 1..20: mol_type = other RNA
ccaccagtagccactgtccc

SEQ ID NO: 408 - RNA, 20 nt, synthetic construct
  misc_feature 1..20: note = Synthetic
  source 1..20: mol_type = other RNA
ccaggtgcttcataaagtcc

SEQ ID NO: 409 - RNA, 20 nt, synthetic construct
  misc_feature 1..20: note = Synthetic
  source 1..20: mol_type = other RNA
cttctgattcgccgcagagg

SEQ ID NO: 410 - RNA, 20 nt, synthetic construct
  misc_feature 1..20: note = Synthetic
  source 1..20: mol_type = other RNA
gtgctgctactccacctctg

SEQ ID NO: 411 - RNA, 20 nt, synthetic construct
  misc_feature 1..20: note = Synthetic
  source 1..20: mol_type = other RNA
acacggcagctggccaatga

SEQ ID NO: 412 - RNA, 20 nt, synthetic construct
  misc_feature 1..20: note = Synthetic
  source 1..20: mol_type = other RNA
atgtcagtgtaacatacctg

SEQ ID NO: 413 - RNA, 20 nt, synthetic construct
  misc_feature 1..20: note = Synthetic
  source 1..20: mol_type = other RNA
taccttctgattcgccgcag

SEQ ID NO: 414 - RNA, 20 nt, synthetic construct
  misc_feature 1..20: note = Synthetic
  source 1..20: mol_type = other RNA
caaactcttggtacagcaca

SEQ ID NO: 415 - RNA, 20 nt, synthetic construct
  misc_feature 1..20: note = Synthetic
  source 1..20: mol_type = other RNA
gcgcaaatccaaaacagact

SEQ ID NO: 416 - RNA, 20 nt, synthetic construct
  misc_feature 1..20: note = Synthetic
  source 1..20: mol_type = other RNA
aatttattgtgggcttcaca

SEQ ID NO: 417 - RNA, 20 nt, synthetic construct
  misc_feature 1..20: note = Synthetic
  source 1..20: mol_type = other RNA
cgcaaatccaaaacagactt

SEQ ID NO: 418 - RNA, 20 nt, synthetic construct
  misc_feature 1..20: note = Synthetic
  source 1..20: mol_type = other RNA
ctgtaccaagagtttgctcc

SEQ ID NO: 419 - RNA, 20 nt, synthetic construct
  misc_feature 1..20: note = Synthetic
  source 1..20: mol_type = other RNA
agcagccaggagcaaactct

SEQ ID NO: 420 - RNA, 20 nt, synthetic construct
  misc_feature 1..20: note = Synthetic
  source 1..20: mol_type = other RNA
gcactgacatcaaagcagcc

SEQ ID NO: 421 - RNA, 20 nt, synthetic construct
  misc_feature 1..20: note = Synthetic
  source 1..20: mol_type = other RNA
cacctctgcggcgaatcaga

SEQ ID NO: 422 - RNA, 20 nt, synthetic construct
  misc_feature 1..20: note = Synthetic
  source 1..20: mol_type = other RNA
tgtgggcttcacacggcagc

SEQ ID NO: 423 - RNA, 20 nt, synthetic construct
  misc_feature 1..20: note = Synthetic
  source 1..20: mol_type = other RNA
attgatgtcacagccttcat

SEQ ID NO: 424 - RNA, 20 nt, synthetic construct
  misc_feature 1..20: note = Synthetic
  source 1..20: mol_type = other RNA
agcaactttgactgctgtct

SEQ ID NO: 425 - RNA, 20 nt, synthetic construct
  misc_feature 1..20: note = Synthetic
  source 1..20: mol_type = other RNA
gtgaagcccacaataaattt

SEQ ID NO: 426 - RNA, 20 nt, synthetic construct
  misc_feature 1..20: note = Synthetic
  source 1..20: mol_type = other RNA
cgaacgtccatgctgcacag

SEQ ID NO: 427 - RNA, 20 nt, synthetic construct
  misc_feature 1..20: note = Synthetic
  source 1..20: mol_type = other RNA
aagactcgactcacccgcga

SEQ ID NO: 428 - RNA, 20 nt, synthetic construct
  misc_feature 1..20: note = Synthetic
  source 1..20: mol_type = other RNA
cttgaactccaccggcaggg

SEQ ID NO: 429 - RNA, 20 nt, synthetic construct
  misc_feature 1..20: note = Synthetic
  source 1..20: mol_type = other RNA
accgtaccaccgaagatgca

SEQ ID NO: 430 - RNA, 20 nt, synthetic construct
  misc_feature 1..20: note = Synthetic
  source 1..20: mol_type = other RNA
gacccatgcgacccgcacaa

SEQ ID NO: 431 - RNA, 20 nt, synthetic construct
  misc_feature 1..20: note = Synthetic
  source 1..20: mol_type = other RNA
gaagactcgactcacccgcg

SEQ ID NO: 432 - RNA, 20 nt, synthetic construct
  misc_feature 1..20: note = Synthetic
  source 1..20: mol_type = other RNA
ggtggtacggtgtaccgcag

SEQ ID NO: 433 - RNA, 20 nt, synthetic construct
  misc_feature 1..20: note = Synthetic
  source 1..20: mol_type = other RNA
tctggaaggactctccgctg

SEQ ID NO: 434 - RNA, 20 nt, synthetic construct
  misc_feature 1..20: note = Synthetic
  source 1..20: mol_type = other RNA
cgggtcgcatgggtcgcgct

SEQ ID NO: 435 - RNA, 20 nt, synthetic construct
  misc_feature 1..20: note = Synthetic
  source 1..20: mol_type = other RNA
gttcaagtgccctgacggcg

SEQ ID NO: 436 - RNA, 20 nt, synthetic construct
  misc_feature 1..20: note = Synthetic
  source 1..20: mol_type = other RNA
gggggtgcagcatcggccgt

SEQ ID NO: 437 - RNA, 20 nt, synthetic construct
  misc_feature 1..20: note = Synthetic
  source 1..20: mol_type = other RNA
cgagcccaaggaccaaaccg

SEQ ID NO: 438 - RNA, 20 nt, synthetic construct
  misc_feature 1..20: note = Synthetic
  source 1..20: mol_type = other RNA
ctgcagttctggccgacggc

SEQ ID NO: 439 - RNA, 20 nt, synthetic construct
  misc_feature 1..20: note = Synthetic
  source 1..20: mol_type = other RNA
gcggacggggcccatactgg

SEQ ID NO: 440 - RNA, 20 nt, synthetic construct
  misc_feature 1..20: note = Synthetic
  source 1..20: mol_type = other RNA
tatgattagagccaactgcc

SEQ ID NO: 441 - RNA, 20 nt, synthetic construct
  misc_feature 1..20: note = Synthetic
  source 1..20: mol_type = other RNA
tgctctcgcagcttaccgac

SEQ ID NO: 442 - RNA, 20 nt, synthetic construct
  misc_feature 1..20: note = Synthetic
  source 1..20: mol_type = other RNA
tccgggacagttgtaatggc

SEQ ID NO: 443 - RNA, 20 nt, synthetic construct
  misc_feature 1..20: note = Synthetic
  source 1..20: mol_type = other RNA
gttgtcattggtaacccggg

SEQ ID NO: 444 - RNA, 20 nt, synthetic construct
  misc_feature 1..20: note = Synthetic
  source 1..20: mol_type = other RNA
gggcaggcccaaccacggtt

SEQ ID NO: 445 - RNA, 20 nt, synthetic construct
  misc_feature 1..20: note = Synthetic
  source 1..20: mol_type = other RNA
acgaacgtccatgctgcaca

SEQ ID NO: 446 - RNA, 20 nt, synthetic construct
  misc_feature 1..20: note = Synthetic
  source 1..20: mol_type = other RNA
cccgctgcagttctggccga

SEQ ID NO: 447 - RNA, 20 nt, synthetic construct
  misc_feature 1..20: note = Synthetic
  source 1..20: mol_type = other RNA
tcagggcacttgaactccac

SEQ ID NO: 448 - RNA, 20 nt, synthetic construct
  misc_feature 1..20: note = Synthetic
  source 1..20: mol_type = other RNA
ttctgtggagtatgtaccga

SEQ ID NO: 449 - RNA, 20 nt, synthetic construct
  misc_feature 1..20: note = Synthetic
  source 1..20: mol_type = other RNA
agagccgcctgtgcatggtc

SEQ ID NO: 450 - RNA, 20 nt, synthetic construct
  misc_feature 1..20: note = Synthetic
  source 1..20: mol_type = other RNA
ggcgttgtcattggtaaccc

SEQ ID NO: 451 - RNA, 20 nt, synthetic construct
  misc_feature 1..20: note = Synthetic
  source 1..20: mol_type = other RNA
ggccaaacgtgtcttccagt

SEQ ID NO: 452 - RNA, 20 nt, synthetic construct
  misc_feature 1..20: note = Synthetic
  source 1..20: mol_type = other RNA
agcttgaccctcctcgggaa

SEQ ID NO: 453 - RNA, 20 nt, synthetic construct
  misc_feature 1..20: note = Synthetic
  source 1..20: mol_type = other RNA
agcacgaggctcacgcccgc

SEQ ID NO: 454 - RNA, 20 nt, synthetic construct
  misc_feature 1..20: note = Synthetic
  source 1..20: mol_type = other RNA
gacggggcccatactggcgg

SEQ ID NO: 455 - RNA, 20 nt, synthetic construct
  misc_feature 1..20: note = Synthetic
  source 1..20: mol_type = other RNA
agctcggtatgtcttcatgc

SEQ ID NO: 456 - RNA, 20 nt, synthetic construct
  misc_feature 1..20: note = Synthetic
  source 1..20: mol_type = other RNA
cgcaaggcctgaccatgcac

SEQ ID NO: 457 - RNA, 20 nt, synthetic construct
  misc_feature 1..20: note = Synthetic
  source 1..20: mol_type = other RNA
taccgactggaagacacgtt

SEQ ID NO: 458 - RNA, 20 nt, synthetic construct
  misc_feature 1..20: note = Synthetic
  source 1..20: mol_type = other RNA
gcttgaccctcctcgggaag

SEQ ID NO: 459 - RNA, 20 nt, synthetic construct
  misc_feature 1..20: note = Synthetic
  source 1..20: mol_type = other RNA
gacgaacgtccatgctgcac

SEQ ID NO: 460 - RNA, 20 nt, synthetic construct
  misc_feature 1..20: note = Synthetic
  source 1..20: mol_type = other RNA
ccagtgcacgtgcctggacg

SEQ ID NO: 461 - RNA, 20 nt, synthetic construct
  misc_feature 1..20: note = Synthetic
  source 1..20: mol_type = other RNA
caagtaccagtgcacgtgcc

SEQ ID NO: 462 - RNA, 20 nt, synthetic construct
  misc_feature 1..20: note = Synthetic
  source 1..20: mol_type = other RNA
tccctgcatcttcggtggta

SEQ ID NO: 463 - RNA, 20 nt, synthetic construct
  misc_feature 1..20: note = Synthetic
  source 1..20: mol_type = other RNA
tccccggccaaccgcaagat

SEQ ID NO: 464 - RNA, 20 nt, synthetic construct
  misc_feature 1..20: note = Synthetic
  source 1..20: mol_type = other RNA
cggtgcacacgccgatcttg

SEQ ID NO: 465 - RNA, 20 nt, synthetic construct
  misc_feature 1..20: note = Synthetic
  source 1..20: mol_type = other RNA
acgccgatcttgcggttggc

SEQ ID NO: 466 - RNA, 20 nt, synthetic construct
  misc_feature 1..20: note = Synthetic
  source 1..20: mol_type = other RNA
attctgtcacttcggctccc

SEQ ID NO: 467 - RNA, 20 nt, synthetic construct
  misc_feature 1..20: note = Synthetic
  source 1..20: mol_type = other RNA
accatgaccgccgccagtat

SEQ ID NO: 468 - RNA, 20 nt, synthetic construct
  misc_feature 1..20: note = Synthetic
  source 1..20: mol_type = other RNA
aaccatgaccgccgccagta

SEQ ID NO: 469 - RNA, 20 nt, synthetic construct
  misc_feature 1..20: note = Synthetic
  source 1..20: mol_type = other RNA
tgtctccgggacagttgtaa

SEQ ID NO: 470 - RNA, 20 nt, synthetic construct
  misc_feature 1..20: note = Synthetic
  source 1..20: mol_type = other RNA
cccaaggaccaaaccgtggt

SEQ ID NO: 471 - RNA, 20 nt, synthetic construct
  misc_feature 1..20: note = Synthetic
  source 1..20: mol_type = other RNA
cagcttgaccctcctcggga

SEQ ID NO: 472 - RNA, 20 nt, synthetic construct
  misc_feature 1..20: note = Synthetic
  source 1..20: mol_type = other RNA
cgcaagatcggcgtgtgcac

SEQ ID NO: 473 - RNA, 20 nt, synthetic construct
  misc_feature 1..20: note = Synthetic
  source 1..20: mol_type = other RNA
cgacccatgcgacccgcaca

SEQ ID NO: 474 - RNA, 20 nt, synthetic construct
  misc_feature 1..20: note = Synthetic
  source 1..20: mol_type = other RNA
ggagcgccggatgtgccgac

SEQ ID NO: 475 - RNA, 20 nt, synthetic construct
  misc_feature 1..20: note = Synthetic
  source 1..20: mol_type = other RNA
acgcaactttgagcgcaaca

SEQ ID NO: 476 - RNA, 20 nt, synthetic construct
  misc_feature 1..20: note = Synthetic
  source 1..20: mol_type = other RNA
catcagcattgaccgctacg

SEQ ID NO: 477 - RNA, 20 nt, synthetic construct
  misc_feature 1..20: note = Synthetic
  source 1..20: mol_type = other RNA
aggcagaagagtcgcctatg

SEQ ID NO: 478 - RNA, 20 nt, synthetic construct
  misc_feature 1..20: note = Synthetic
  source 1..20: mol_type = other RNA
ccggcgctcctccatgagtg

SEQ ID NO: 479 - RNA, 20 nt, synthetic construct
  misc_feature 1..20: note = Synthetic
  source 1..20: mol_type = other RNA
gccgcgctgtaggcccagaa

SEQ ID NO: 480 - RNA, 20 nt, synthetic construct
  misc_feature 1..20: note = Synthetic
  source 1..20: mol_type = other RNA
gaggtcacggacgattacat

SEQ ID NO: 481 - RNA, 20 nt, synthetic construct
  misc_feature 1..20: note = Synthetic
  source 1..20: mol_type = other RNA
gcgctcctccatgagtgtgg

SEQ ID NO: 482 - RNA, 20 nt, synthetic construct
  misc_feature 1..20: note = Synthetic
  source 1..20: mol_type = other RNA
tcccttctgggcctacagcg

SEQ ID NO: 483 - RNA, 20 nt, synthetic construct
  misc_feature 1..20: note = Synthetic
  source 1..20: mol_type = other RNA
gagcaggtaggtatcggtca

SEQ ID NO: 484 - RNA, 20 nt, synthetic construct
  misc_feature 1..20: note = Synthetic
  source 1..20: mol_type = other RNA
ccgtgacctcatcttgacac

SEQ ID NO: 485 - RNA, 20 nt, synthetic construct
  misc_feature 1..20: note = Synthetic
  source 1..20: mol_type = other RNA
gcggaacttgacgccgatga

SEQ ID NO: 486 - RNA, 20 nt, synthetic construct
  misc_feature 1..20: note = Synthetic
  source 1..20: mol_type = other RNA
taggcccacgaaacaaatga

SEQ ID NO: 487 - RNA, 20 nt, synthetic construct
  misc_feature 1..20: note = Synthetic
  source 1..20: mol_type = other RNA
caggcagaagagtcgcctat

SEQ ID NO: 488 - RNA, 20 nt, synthetic construct
  misc_feature 1..20: note = Synthetic
  source 1..20: mol_type = other RNA
gccaggaccaccccattgta

SEQ ID NO: 489 - RNA, 20 nt, synthetic construct
  misc_feature 1..20: note = Synthetic
  source 1..20: mol_type = other RNA
ctacgacgtcacctacagcc

SEQ ID NO: 490 - RNA, 20 nt, synthetic construct
  misc_feature 1..20: note = Synthetic
  source 1..20: mol_type = other RNA
ggtctcggcctccacactca

SEQ ID NO: 491 - RNA, 20 nt, synthetic construct
  misc_feature 1..20: note = Synthetic
  source 1..20: mol_type = other RNA
ccgatgaaggcgtacaagaa

SEQ ID NO: 492 - RNA, 20 nt, synthetic construct
  misc_feature 1..20: note = Synthetic
  source 1..20: mol_type = other RNA
tgcgctcaaagttgcgtgcc

SEQ ID NO: 493 - RNA, 20 nt, synthetic construct
  misc_feature 1..20: note = Synthetic
  source 1..20: mol_type = other RNA
ctacagcgcggccaagtcct

SEQ ID NO: 494 - RNA, 20 nt, synthetic construct
  misc_feature 1..20: note = Synthetic
  source 1..20: mol_type = other RNA
tgatggagtacatgataggg

SEQ ID NO: 495 - RNA, 20 nt, synthetic construct
  misc_feature 1..20: note = Synthetic
  source 1..20: mol_type = other RNA
ccacactcatggaggagcgc

SEQ ID NO: 496 - RNA, 20 nt, synthetic construct
  misc_feature 1..20: note = Synthetic
  source 1..20: mol_type = other RNA
catcaaggtgatcatcgctg

SEQ ID NO: 497 - RNA, 20 nt, synthetic construct
  misc_feature 1..20: note = Synthetic
  source 1..20: mol_type = other RNA
tcgtgggcctactgggcaat

SEQ ID NO: 498 - RNA, 20 nt, synthetic construct
  misc_feature 1..20: note = Synthetic
  source 1..20: mol_type = other RNA
acgtgcggaactttaaagcc

SEQ ID NO: 499 - RNA, 20 nt, synthetic construct
  misc_feature 1..20: note = Synthetic
  source 1..20: mol_type = other RNA
gttgacgcagcagcggacgc

SEQ ID NO: 500 - RNA, 20 nt, synthetic construct
  misc_feature 1..20: note = Synthetic
  source 1..20: mol_type = other RNA
ccaggacttggccgcgctgt

SEQ ID NO: 501 - RNA, 20 nt, synthetic construct
  misc_feature 1..20: note = Synthetic
  source 1..20: mol_type = other RNA
aaagttccgcacgtccttct

SEQ ID NO: 502 - RNA, 20 nt, synthetic construct
  misc_feature 1..20: note = Synthetic
  source 1..20: mol_type = other RNA
tgttgaagttggccaccgtc

SEQ ID NO: 503 - RNA, 20 nt, synthetic construct
  misc_feature 1..20: note = Synthetic
  source 1..20: mol_type = other RNA
ccgctacgtggccatcgtcc

SEQ ID NO: 504 - RNA, 20 nt, synthetic construct
  misc_feature 1..20: note = Synthetic
  source 1..20: mol_type = other RNA
gaaaccaatgaaaagcgtgc

SEQ ID NO: 505 - RNA, 20 nt, synthetic construct
  misc_feature 1..20: note = Synthetic
  source 1..20: mol_type = other RNA
caggctgtaggtgacgtcgt

SEQ ID NO: 506 - RNA, 20 nt, synthetic construct
  misc_feature 1..20: note = Synthetic
  source 1..20: mol_type = other RNA
cctacagcgcggccaagtcc

SEQ ID NO: 507 - RNA, 20 nt, synthetic construct
  misc_feature 1..20: note = Synthetic
  source 1..20: mol_type = other RNA
gtactccatcatttgtttcg

SEQ ID NO: 508 - RNA, 20 nt, synthetic construct
  misc_feature 1..20: note = Synthetic
  source 1..20: mol_type = other RNA
cgatgaaggcgtacaagaaa

SEQ ID NO: 509 - RNA, 20 nt, synthetic construct
  misc_feature 1..20: note = Synthetic
  source 1..20: mol_type = other RNA
tcttccagctgccctacaat

SEQ ID NO: 510 - RNA, 20 nt, synthetic construct
  misc_feature 1..20: note = Synthetic
  source 1..20: mol_type = other RNA
accaatgaaaagcgtgctgg

SEQ ID NO: 511 - RNA, 20 nt, synthetic construct
  misc_feature 1..20: note = Synthetic
  source 1..20: mol_type = other RNA
accaccagcacgcttttcat

SEQ ID NO: 512 - RNA, 20 nt, synthetic construct
  misc_feature 1..20: note = Synthetic
  source 1..20: mol_type = other RNA
gttgaagttggccaccgtct

SEQ ID NO: 513 - RNA, 20 nt, synthetic construct
  misc_feature 1..20: note = Synthetic
  source 1..20: mol_type = other RNA
tcctctggaggtcactgtac

SEQ ID NO: 514 - RNA, 20 nt, synthetic construct
  misc_feature 1..20: note = Synthetic
  source 1..20: mol_type = other RNA
tactccatcatttgtttcgt

SEQ ID NO: 515 - RNA, 20 nt, synthetic construct
  misc_feature 1..20: note = Synthetic
  source 1..20: mol_type = other RNA
cctttcttgtacgccttcat

SEQ ID NO: 516 - RNA, 20 nt, synthetic construct
  misc_feature 1..20: note = Synthetic
  source 1..20: mol_type = other RNA
atttgtttcgtgggcctact

SEQ ID NO: 517 - RNA, 20 nt, synthetic construct
  misc_feature 1..20: note = Synthetic
  source 1..20: mol_type = other RNA
cacagcgatgatcaccttga

SEQ ID NO: 518 - RNA, 20 nt, synthetic construct
  misc_feature 1..20: note = Synthetic
  source 1..20: mol_type = other RNA
gagtgaagagcggctcacgg

SEQ ID NO: 519 - RNA, 20 nt, synthetic construct
  misc_feature 1..20: note = Synthetic
  source 1..20: mol_type = other RNA
ccggcgagcaccttggcgcg

SEQ ID NO: 520 - RNA, 20 nt, synthetic construct
  misc_feature 1..20: note = Synthetic
  source 1..20: mol_type = other RNA
ccgcgcgccaaggtgctcgc

SEQ ID NO: 521 - RNA, 20 nt, synthetic construct
  misc_feature 1..20: note = Synthetic
  source 1..20: mol_type = other RNA
caagctcccggcatgcagcg

SEQ ID NO: 522 - RNA, 20 nt, synthetic construct
  misc_feature 1..20: note = Synthetic
  source 1..20: mol_type = other RNA
tcaggactctggtgcctgca

SEQ ID NO: 523 - RNA, 20 nt, synthetic construct
  misc_feature 1..20: note = Synthetic
  source 1..20: mol_type = other RNA
ccacagcagtcacaggccgg

SEQ ID NO: 524 - RNA, 20 nt, synthetic construct
  misc_feature 1..20: note = Synthetic
  source 1..20: mol_type = other RNA
gggatcgccgcgctgcatgc

SEQ ID NO: 525 - RNA, 20 nt, synthetic construct
  misc_feature 1..20: note = Synthetic
  source 1..20: mol_type = other RNA
ggtgccagctccgcgcgcca

SEQ ID NO: 526 - RNA, 20 nt, synthetic construct
  misc_feature 1..20: note = Synthetic
  source 1..20: mol_type = other RNA
ggcgatcccggcgagcacct

SEQ ID NO: 527 - RNA, 20 nt, synthetic construct
  misc_feature 1..20: note = Synthetic
  source 1..20: mol_type = other RNA
tgcgcttctcagtaactacg

SEQ ID NO: 528 - RNA, 20 nt, synthetic construct
  misc_feature 1..20: note = Synthetic
  source 1..20: mol_type = other RNA
tggcaccttggcgctgttgg

SEQ ID NO: 529 - RNA, 20 nt, synthetic construct
  misc_feature 1..20: note = Synthetic
  source 1..20: mol_type = other RNA
tggatctccacagcagtcac

SEQ ID NO: 530 - RNA, 20 nt, synthetic construct
  misc_feature 1..20: note = Synthetic
  source 1..20: mol_type = other RNA
agagagtgaagagcggctca

SEQ ID NO: 531 - RNA, 20 nt, synthetic construct
  misc_feature 1..20: note = Synthetic
  source 1..20: mol_type = other RNA
cgccgccaccaacagcgcca

SEQ ID NO: 532 - RNA, 20 nt, synthetic construct
  misc_feature 1..20: note = Synthetic
  source 1..20: mol_type = other RNA
ggcgcgcggagctggcacct

SEQ ID NO: 533 - RNA, 20 nt, synthetic construct
  misc_feature 1..20: note = Synthetic
  source 1..20: mol_type = other RNA
acatatcaaaaacaccatgc

SEQ ID NO: 534 - RNA, 20 nt, synthetic construct
  misc_feature 1..20: note = Synthetic
  source 1..20: mol_type = other RNA
gcagaatgctggtgacggtg

SEQ ID NO: 535 - RNA, 20 nt, synthetic construct
  misc_feature 1..20: note = Synthetic
  source 1..20: mol_type = other RNA
agagagcagcgcgggccatg

SEQ ID NO: 536 - RNA, 20 nt, synthetic construct
  misc_feature 1..20: note = Synthetic
  source 1..20: mol_type = other RNA
acctgctgcgcgccggccag

SEQ ID NO: 537 - RNA, 20 nt, synthetic construct
  misc_feature 1..20: note = Synthetic
  source 1..20: mol_type = other RNA
gagccacactcaagaatggg

SEQ ID NO: 538 - RNA, 20 nt, synthetic construct
  misc_feature 1..20: note = Synthetic
  source 1..20: mol_type = other RNA
ctatgggggatgcaggattg

SEQ ID NO: 539 - RNA, 20 nt, synthetic construct
  misc_feature 1..20: note = Synthetic
  source 1..20: mol_type = other RNA
gcactggcagcgcagttcag

SEQ ID NO: 540 - RNA, 20 nt, synthetic construct
  misc_feature 1..20: note = Synthetic
  source 1..20: mol_type = other RNA
gagagagcagcgcgggccat

SEQ ID NO: 541 - RNA, 20 nt, synthetic construct
  misc_feature 1..20: note = Synthetic
  source 1..20: mol_type = other RNA
agtgccactcgcaggagccg

SEQ ID NO: 542 - RNA, 20 nt, synthetic construct
  misc_feature 1..20: note = Synthetic
  source 1..20: mol_type = other RNA
ttcttccctaggagcgtccg

SEQ ID NO: 543 - RNA, 20 nt, synthetic construct
  misc_feature 1..20: note = Synthetic
  source 1..20: mol_type = other RNA
acttcggtttgggcgcagtg

SEQ ID NO: 544 - RNA, 20 nt, synthetic construct
  misc_feature 1..20: note = Synthetic
  source 1..20: mol_type = other RNA
cgcgccggccagcggctacc

SEQ ID NO: 545 - RNA, 20 nt, synthetic construct
  misc_feature 1..20: note = Synthetic
  source 1..20: mol_type = other RNA
gatgattttcttaactatgg

SEQ ID NO: 546 - RNA, 20 nt, synthetic construct
  misc_feature 1..20: note = Synthetic
  source 1..20: mol_type = other RNA
ctggccggcgcgcagcaggt

SEQ ID NO: 547 - RNA, 20 nt, synthetic construct
  misc_feature 1..20: note = Synthetic
  source 1..20: mol_type = other RNA
cttggggtgaattccctgca

SEQ ID NO: 548 - RNA, 20 nt, synthetic construct
  misc_feature 1..20: note = Synthetic
  source 1..20: mol_type = other RNA
agtgtgaacgtgaagtcccc

SEQ ID NO: 549 - RNA, 20 nt, synthetic construct
  misc_feature 1..20: note = Synthetic
  source 1..20: mol_type = other RNA
gggcggcggagagagcagcg

SEQ ID NO: 550 - RNA, 20 nt, synthetic construct
  misc_feature 1..20: note = Synthetic
  source 1..20: mol_type = other RNA
ggagcagcagtgccactcgc

SEQ ID NO: 551 - RNA, 20 nt, synthetic construct
  misc_feature 1..20: note = Synthetic
  source 1..20: mol_type = other RNA
tgctcctggtagccgctggc

SEQ ID NO: 552 - RNA, 20 nt, synthetic construct
  misc_feature 1..20: note = Synthetic
  source 1..20: mol_type = other RNA
tcttaaccatgggcgatgcg

SEQ ID NO: 553 - RNA, 20 nt, synthetic construct
  misc_feature 1..20: note = Synthetic
  source 1..20: mol_type = other RNA
tctcaaccccgcatcgccca

SEQ ID NO: 554 - RNA, 20 nt, synthetic construct
  misc_feature 1..20: note = Synthetic
  source 1..20: mol_type = other RNA
tttcttaaccatgggcgatg

SEQ ID NO: 555 - RNA, 20 nt, synthetic construct
  misc_feature 1..20: note = Synthetic
  source 1..20: mol_type = other RNA
cagcgcagttcagtggccag

SEQ ID NO: 556 - RNA, 20 nt, synthetic construct
  misc_feature 1..20: note = Synthetic
  source 1..20: mol_type = other RNA
ttcttaaccatgggcgatgc

SEQ ID NO: 557 - RNA, 20 nt, synthetic construct
  misc_feature 1..20: note = Synthetic
  source 1..20: mol_type = other RNA
agagcgtggcgcgggccatg

SEQ ID NO: 558 - RNA, 20 nt, synthetic construct
  misc_feature 1..20: note = Synthetic
  source 1..20: mol_type = other RNA
acttcggtttgggcgcagtg

SEQ ID NO: 559 - RNA, 20 nt, synthetic construct
  misc_feature 1..20: note = Synthetic
  source 1..20: mol_type = other RNA
gcactggcagcgcagttcag

SEQ ID NO: 560 - RNA, 20 nt, synthetic construct
  misc_feature 1..20: note = Synthetic
  source 1..20: mol_type = other RNA
ttcttccctaggagcgcccc

SEQ ID NO: 561 - RNA, 20 nt, synthetic construct
  misc_feature 1..20: note = Synthetic
  source 1..20: mol_type = other RNA
caagaacatccaaagtgtga

SEQ ID NO: 562 - RNA, 20 nt, synthetic construct
  misc_feature 1..20: note = Synthetic
  source 1..20: mol_type = other RNA
cttgaggtgaattccctgca

SEQ ID NO: 563 - RNA, 20 nt, synthetic construct
  misc_feature 1..20: note = Synthetic
  source 1..20: mol_type = other RNA
agtgtgaaggtgaagtcccc

SEQ ID NO: 564 - RNA, 20 nt, synthetic construct
  misc_feature 1..20: note = Synthetic
  source 1..20: mol_type = other RNA
acctgctgcgcgccggctgg

SEQ ID NO: 565 - RNA, 20 nt, synthetic construct
  misc_feature 1..20: note = Synthetic
  source 1..20: mol_type = other RNA
gggacccacctgctgcgcgc

SEQ ID NO: 566 - RNA, 20 nt, synthetic construct
  misc_feature 1..20: note = Synthetic
  source 1..20: mol_type = other RNA
gagagcgtggcgcgggccat

SEQ ID NO: 567 - RNA, 20 nt, synthetic construct
  misc_feature 1..20: note = Synthetic
  source 1..20: mol_type = other RNA
gggcgagacttacatgactt

SEQ ID NO: 568 - RNA, 20 nt, synthetic construct
  misc_feature 1..20: note = Synthetic
  source 1..20: mol_type = other RNA
cagtgcttgcagaccctgca

SEQ ID NO: 569 - RNA, 20 nt, synthetic construct
  misc_feature 1..20: note = Synthetic
  source 1..20: mol_type = other RNA
tctgaaccatgggggatgcg

SEQ ID NO: 570 - RNA, 20 nt, synthetic construct
  misc_feature 1..20: note = Synthetic
  source 1..20: mol_type = other RNA
agtgtgaatgtaaggtcccc

SEQ ID NO: 571 - RNA, 20 nt, synthetic construct
  misc_feature 1..20: note = Synthetic
  source 1..20: mol_type = other RNA
cagggggagcaccaactgac

SEQ ID NO: 572 - RNA, 20 nt, synthetic construct
  misc_feature 1..20: note = Synthetic
  source 1..20: mol_type = other RNA
gatgattttctgaaccatgg

SEQ ID NO: 573 - RNA, 20 nt, synthetic construct
  misc_feature 1..20: note = Synthetic
  source 1..20: mol_type = other RNA
ttcttccctaggagcgtccg

SEQ ID NO: 574 - RNA, 20 nt, synthetic construct
  misc_feature 1..20: note = Synthetic
  source 1..20: mol_type = other RNA
acttcggtttgggcgcagtg

SEQ ID NO: 575 - RNA, 20 nt, synthetic construct
  misc_feature 1..20: note = Synthetic
  source 1..20: mol_type = other RNA
tctcaaccccgcatccccca

SEQ ID NO: 576 - RNA, 20 nt, synthetic construct
  misc_feature 1..20: note = Synthetic
  source 1..20: mol_type = other RNA
cgatgattttctgaaccatg

SEQ ID NO: 577 - RNA, 20 nt, synthetic construct
  misc_feature 1..20: note = Synthetic
  source 1..20: mol_type = other RNA
acatccaaagtgtgaatgta

SEQ ID NO: 578 - RNA, 20 nt, synthetic construct
  misc_feature 1..20: note = Synthetic
  source 1..20: mol_type = other RNA
gggaccttacattcacactt

SEQ ID NO: 579 - RNA, 20 nt, synthetic construct
  misc_feature 1..20: note = Synthetic
  source 1..20: mol_type = other RNA
cagtgcttgcagacactgca

SEQ ID NO: 580 - RNA, 20 nt, synthetic construct
  misc_feature 1..20: note = Synthetic
  source 1..20: mol_type = other RNA
gcagcgcagttcagtgacca

SEQ ID NO: 581 - RNA, 20 nt, synthetic construct
  misc_feature 1..20: note = Synthetic
  source 1..20: mol_type = other RNA
agagcgtggcgtgggccatg

SEQ ID NO: 582 - RNA, 20 nt, synthetic construct
  misc_feature 1..20: note = Synthetic
  source 1..20: mol_type = other RNA
acctgctgcgcgccggctgg

SEQ ID NO: 583 - RNA, 20 nt, synthetic construct
  misc_feature 1..20: note = Synthetic
  source 1..20: mol_type = other RNA
tcgatgattttctgaaccat

SEQ ID NO: 584 - RNA, 20 nt, synthetic construct
  misc_feature 1..20: note = Synthetic
  source 1..20: mol_type = other RNA
gggacccacctgctgcgcgc

SEQ ID NO: 585 - RNA, 20 nt, synthetic construct
  misc_feature 1..20: note = Synthetic
  source 1..20: mol_type = other RNA
gagagcgtggcgtgggccat

SEQ ID NO: 586 - RNA, 20 nt, synthetic construct
  misc_feature 1..20: note = Synthetic
  source 1..20: mol_type = other RNA
tttgggatgaactccttgcg

SEQ ID NO: 587 - RNA, 20 nt, synthetic construct
  misc_feature 1..20: note = Synthetic
  source 1..20: mol_type = other RNA
acaaggagctcgaaggaccg

SEQ ID NO: 588 - RNA, 20 nt, synthetic construct
  misc_feature 1..20: note = Synthetic
  source 1..20: mol_type = other RNA
aatctgcaagtgttcgccat

SEQ ID NO: 589 - RNA, 20 nt, synthetic construct
  misc_feature 1..20: note = Synthetic
  source 1..20: mol_type = other RNA
agcgcgcacaaggagctcga

SEQ ID NO: 590 - RNA, 20 nt, synthetic construct
  misc_feature 1..20: note = Synthetic
  source 1..20: mol_type = other RNA
cataggcccacagtgctcca

SEQ ID NO: 591 - RNA, 20 nt, synthetic construct
  misc_feature 1..20: note = Synthetic
  source 1..20: mol_type = other RNA
cagccagggcccatcgccag

SEQ ID NO: 592 - RNA, 20 nt, synthetic construct
  misc_feature 1..20: note = Synthetic
  source 1..20: mol_type = other RNA
gtttgtttacagaccacgca

SEQ ID NO: 593 - RNA, 20 nt, synthetic construct
  misc_feature 1..20: note = Synthetic
  source 1..20: mol_type = other RNA
gctcgaaggaccggggacac

SEQ ID NO: 594 - RNA, 20 nt, synthetic construct
  misc_feature 1..20: note = Synthetic
  source 1..20: mol_type = other RNA
aggcccacagtgctccaagg

SEQ ID NO: 595 - RNA, 20 nt, synthetic construct
  misc_feature 1..20: note = Synthetic
  source 1..20: mol_type = other RNA
gcgctctcaccgctggcgat

SEQ ID NO: 596 - RNA, 20 nt, synthetic construct
  misc_feature 1..20: note = Synthetic
  source 1..20: mol_type = other RNA
gcgccatgcgctctcaccgc

SEQ ID NO: 597 - RNA, 20 nt, synthetic construct
  misc_feature 1..20: note = Synthetic
  source 1..20: mol_type = other RNA
gcacaaggagctcgaaggac

SEQ ID NO: 598 - RNA, 20 nt, synthetic construct
  misc_feature 1..20: note = Synthetic
  source 1..20: mol_type = other RNA
agctcgaaggaccggggaca

SEQ ID NO: 599 - RNA, 20 nt, synthetic construct
  misc_feature 1..20: note = Synthetic
  source 1..20: mol_type = other RNA
agcctccctgaagaacggga

SEQ ID NO: 600 - RNA, 20 nt, synthetic construct
  misc_feature 1..20: note = Synthetic
  source 1..20: mol_type = other RNA
cttggagcactgtgggccta

SEQ ID NO: 601 - RNA, 20 nt, synthetic construct
  misc_feature 1..20: note = Synthetic
  source 1..20: mol_type = other RNA
cacaaggagctcgaaggacc

SEQ ID NO: 602 - RNA, 20 nt, synthetic construct
  misc_feature 1..20: note = Synthetic
  source 1..20: mol_type = other RNA
acttccaccttggagcactg

SEQ ID NO: 603 - RNA, 20 nt, synthetic construct
  misc_feature 1..20: note = Synthetic
  source 1..20: mol_type = other RNA
tggagcactgcgggcctgcg

SEQ ID NO: 604 - RNA, 20 nt, synthetic construct
  misc_feature 1..20: note = Synthetic
  source 1..20: mol_type = other RNA
aggagctctcaccgctggcg

SEQ ID NO: 605 - RNA, 20 nt, synthetic construct
  misc_feature 1..20: note = Synthetic
  source 1..20: mol_type = other RNA
gagctctcaccgctggcgag

SEQ ID NO: 606 - RNA, 20 nt, synthetic construct
  misc_feature 1..20: note = Synthetic
  source 1..20: mol_type = other RNA
ccgccggggcccctcgccag

SEQ ID NO: 607 - RNA, 20 nt, synthetic construct
  misc_feature 1..20: note = Synthetic
  source 1..20: mol_type = other RNA
cgcaggcccgcagtgctcca

SEQ ID NO: 608 - RNA, 20 nt, synthetic construct
  misc_feature 1..20: note = Synthetic
  source 1..20: mol_type = other RNA
acacgggccgcgcggctgga

SEQ ID NO: 609 - RNA, 20 nt, synthetic construct
  misc_feature 1..20: note = Synthetic
  source 1..20: mol_type = other RNA
gcccgaaggacccgggacac

SEQ ID NO: 610 - RNA, 20 nt, synthetic construct
  misc_feature 1..20: note = Synthetic
  source 1..20: mol_type = other RNA
agcgcgcacaaggagcccga

SEQ ID NO: 611 - RNA, 20 nt, synthetic construct
  misc_feature 1..20: note = Synthetic
  source 1..20: mol_type = other RNA
cttggagcactgcgggcctg

SEQ ID NO: 612 - RNA, 20 nt, synthetic construct
  misc_feature 1..20: note = Synthetic
  source 1..20: mol_type = other RNA
aggcccgcagtgctccaagg

SEQ ID NO: 613 - RNA, 20 nt, synthetic construct
  misc_feature 1..20: note = Synthetic
  source 1..20: mol_type = other RNA
acaaggagcccgaaggaccc

SEQ ID NO: 614 - RNA, 20 nt, synthetic construct
  misc_feature 1..20: note = Synthetic
  source 1..20: mol_type = other RNA
gcagtttaccaatcgttttg

SEQ ID NO: 615 - RNA, 20 nt, synthetic construct
  misc_feature 1..20: note = Synthetic
  source 1..20: mol_type = other RNA
aaactgcaggtgttccccgc

SEQ ID NO: 616 - RNA, 20 nt, synthetic construct
  misc_feature 1..20: note = Synthetic
  source 1..20: mol_type = other RNA
gtgccaggagctctcaccgc

SEQ ID NO: 617 - RNA, 20 nt, synthetic construct
  misc_feature 1..20: note = Synthetic
  source 1..20: mol_type = other RNA
caaaacgattggtaaactgc

SEQ ID NO: 618 - RNA, 20 nt, synthetic construct
  misc_feature 1..20: note = Synthetic
  source 1..20: mol_type = other RNA
agcccgaaggacccgggaca

SEQ ID NO: 619 - RNA, 20 nt, synthetic construct
  misc_feature 1..20: note = Synthetic
  source 1..20: mol_type = other RNA
cagccgcgcggcccgtgtcc

SEQ ID NO: 620 - RNA, 20 nt, synthetic construct
  misc_feature 1..20: note = Synthetic
  source 1..20: mol_type = other RNA
atttctgtgttggcgcagtg

SEQ ID NO: 621 - RNA, 20 nt, synthetic construct
  misc_feature 1..20: note = Synthetic
  source 1..20: mol_type = other RNA
ctaagttctttagcactcct

SEQ ID NO: 622 - RNA, 20 nt, synthetic construct
  misc_feature 1..20: note = Synthetic
  source 1..20: mol_type = other RNA
tgtaaacatgacttccaagc

SEQ ID NO: 623 - RNA, 20 nt, synthetic construct
  misc_feature 1..20: note = Synthetic
  source 1..20: mol_type = other RNA
caacaggtgcagttttgcca

SEQ ID NO: 624 - RNA, 20 nt, synthetic construct
  misc_feature 1..20: note = Synthetic
  source 1..20: mol_type = other RNA
caagagagccacggccagct

SEQ ID NO: 625 - RNA, 20 nt, synthetic construct
  misc_feature 1..20: note = Synthetic
  source 1..20: mol_type = other RNA
gaactgagagtgattgagag

SEQ ID NO: 626 - RNA, 20 nt, synthetic construct
  misc_feature 1..20: note = Synthetic
  source 1..20: mol_type = other RNA
catgacttccaagctggccg

SEQ ID NO: 627 - RNA, 20 nt, synthetic construct
  misc_feature 1..20: note = Synthetic
  source 1..20: mol_type = other RNA
cagagctgcagaaatcagga

SEQ ID NO: 628 - RNA, 20 nt, synthetic construct
  misc_feature 1..20: note = Synthetic
  source 1..20: mol_type = other RNA
tgatggaagagagctctgtc

SEQ ID NO: 629 - RNA, 20 nt, synthetic construct
  misc_feature 1..20: note = Synthetic
  source 1..20: mol_type = other RNA
agagctctgtctggacccca

SEQ ID NO: 630 - RNA, 20 nt, synthetic construct
  misc_feature 1..20: note = Synthetic
  source 1..20: mol_type = other RNA
aaatttggggtggaaaggtt

SEQ ID NO: 631 - RNA, 20 nt, synthetic construct
  misc_feature 1..20: note = Synthetic
  source 1..20: mol_type = other RNA
tctggaccccaaggaaaact

SEQ ID NO: 632 - RNA, 20 nt, synthetic construct
  misc_feature 1..20: note = Synthetic
  source 1..20: mol_type = other RNA
tctgcacccagttttccttg

SEQ ID NO: 633 - RNA, 20 nt, synthetic construct
  misc_feature 1..20: note = Synthetic
  source 1..20: mol_type = other RNA
gttctttgataaatttgggg

SEQ ID NO: 634 - RNA, 20 nt, synthetic construct
  misc_feature 1..20: note = Synthetic
  source 1..20: mol_type = other RNA
gaaggctgccaagagagcca

SEQ ID NO: 635 - RNA, 20 nt, synthetic construct
  misc_feature 1..20: note = Synthetic
  source 1..20: mol_type = other RNA
cacacagagctgcagaaatc

SEQ ID NO: 636 - RNA, 20 nt, synthetic construct
  misc_feature 1..20: note = Synthetic
  source 1..20: mol_type = other RNA
atttctgcagctctgtgtga

SEQ ID NO: 637 - RNA, 20 nt, synthetic construct
  misc_feature 1..20: note = Synthetic
  source 1..20: mol_type = other RNA
ttccagtccagtttgctatg

SEQ ID NO: 638 - RNA, 20 nt, synthetic construct
  misc_feature 1..20: note = Synthetic
  source 1..20: mol_type = other RNA
actgacccagaagcgtcact

SEQ ID NO: 639 - RNA, 20 nt, synthetic construct
  misc_feature 1..20: note = Synthetic
  source 1..20: mol_type = other RNA
gcgccgcaacaacatcggcc

SEQ ID NO: 640 - RNA, 20 nt, synthetic construct
  misc_feature 1..20: note = Synthetic
  source 1..20: mol_type = other RNA
gggccttaaacagtgtacgc

SEQ ID NO: 641 - RNA, 20 nt, synthetic construct
  misc_feature 1..20: note = Synthetic
  source 1..20: mol_type = other RNA
gcgaaaattttggccgatga

SEQ ID NO: 642 - RNA, 20 nt, synthetic construct
  misc_feature 1..20: note = Synthetic
  source 1..20: mol_type = other RNA
gtctcagtttctagcataca

SEQ ID NO: 643 - RNA, 20 nt, synthetic construct
  misc_feature 1..20: note = Synthetic
  source 1..20: mol_type = other RNA
gacctcatagcaaactggac

SEQ ID NO: 644 - RNA, 20 nt, synthetic construct
  misc_feature 1..20: note = Synthetic
  source 1..20: mol_type = other RNA
gatggtaagcctggcggaaa

SEQ ID NO: 645 - RNA, 20 nt, synthetic construct
  misc_feature 1..20: note = Synthetic
  source 1..20: mol_type = other RNA
atcggccaaaattttcgcca

SEQ ID NO: 646 - RNA, 20 nt, synthetic construct
  misc_feature 1..20: note = Synthetic
  source 1..20: mol_type = other RNA
tgtgagcgccgcaacaacat

SEQ ID NO: 647 - RNA, 20 nt, synthetic construct
  misc_feature 1..20: note = Synthetic
  source 1..20: mol_type = other RNA
cggatcctgcctcacacctt

SEQ ID NO: 648 - RNA, 20 nt, synthetic construct
  misc_feature 1..20: note = Synthetic
  source 1..20: mol_type = other RNA
cttgaccaagtgacgcttct

SEQ ID NO: 649 - RNA, 20 nt, synthetic construct
  misc_feature 1..20: note = Synthetic
  source 1..20: mol_type = other RNA
tgtctcagtttctagcatac

SEQ ID NO: 650 - RNA, 20 nt, synthetic construct
  misc_feature 1..20: note = Synthetic
  source 1..20: mol_type = other RNA
agcgccgcaacaacatcggc

SEQ ID NO: 651 - RNA, 20 nt, synthetic construct
  misc_feature 1..20: note = Synthetic
  source 1..20: mol_type = other RNA
gggcccggccgatgttgttg

SEQ ID NO: 652 - RNA, 20 nt, synthetic construct
  misc_feature 1..20: note = Synthetic
  source 1..20: mol_type = other RNA
acttgaccaagtgacgcttc

SEQ ID NO: 653 - RNA, 20 nt, synthetic construct
  misc_feature 1..20: note = Synthetic
  source 1..20: mol_type = other RNA
tccagtttgctatgaggtcc

SEQ ID NO: 654 - RNA, 20 nt, synthetic construct
  misc_feature 1..20: note = Synthetic
  source 1..20: mol_type = other RNA
caacaacatcggccgggccc

SEQ ID NO: 655 - RNA, 20 nt, synthetic construct
  misc_feature 1..20: note = Synthetic
  source 1..20: mol_type = other RNA
ccatggattcctcaagatcc

SEQ ID NO: 656 - RNA, 20 nt, synthetic construct
  misc_feature 1..20: note = Synthetic
  source 1..20: mol_type = other RNA
gctactggcctgcatcagtg

SEQ ID NO: 657 - RNA, 20 nt, synthetic construct
  misc_feature 1..20: note = Synthetic
  source 1..20: mol_type = other RNA
tggatgagtagacggtcctt

SEQ ID NO: 658 - RNA, 20 nt, synthetic construct
  misc_feature 1..20: note = Synthetic
  source 1..20: mol_type = other RNA
gagcccggtcgatgtgattg

SEQ ID NO: 659 - RNA, 20 nt, synthetic construct
  misc_feature 1..20: note = Synthetic
  source 1..20: mol_type = other RNA
aaggatgcccagaatctcgg

SEQ ID NO: 660 - RNA, 20 nt, synthetic construct
  misc_feature 1..20: note = Synthetic
  source 1..20: mol_type = other RNA
tgttagcccagcctgctatg

SEQ ID NO: 661 - RNA, 20 nt, synthetic construct
  misc_feature 1..20: note = Synthetic
  source 1..20: mol_type = other RNA
gatgtgattgcggcgctcac

SEQ ID NO: 662 - RNA, 20 nt, synthetic construct
  misc_feature 1..20: note = Synthetic
  source 1..20: mol_type = other RNA
gcgccgcaatcacatcgacc

SEQ ID NO: 663 - RNA, 20 nt, synthetic construct
  misc_feature 1..20: note = Synthetic
  source 1..20: mol_type = other RNA
taagatgaccagcatcacga

SEQ ID NO: 664 - RNA, 20 nt, synthetic construct
  misc_feature 1..20: note = Synthetic
  source 1..20: mol_type = other RNA
actgacccagaagcgctact

SEQ ID NO: 665 - RNA, 20 nt, synthetic construct
  misc_feature 1..20: note = Synthetic
  source 1..20: mol_type = other RNA
caggctcagcaggaatacca

SEQ ID NO: 666 - RNA, 20 nt, synthetic construct
  misc_feature 1..20: note = Synthetic
  source 1..20: mol_type = other RNA
aaggaagtcaacttctatag

SEQ ID NO: 667 - RNA, 20 nt, synthetic construct
  misc_feature 1..20: note = Synthetic
  source 1..20: mol_type = other RNA
catgtatagctagaatcttg

SEQ ID NO: 668 - RNA, 20 nt, synthetic construct
  misc_feature 1..20: note = Synthetic
  source 1..20: mol_type = other RNA
tgtggtcattatctatgccc

SEQ ID NO: 669 - RNA, 20 nt, synthetic construct
  misc_feature 1..20: note = Synthetic
  source 1..20: mol_type = other RNA
gtccttcggaaaagtaagac

SEQ ID NO: 670 - RNA, 20 nt, synthetic construct
  misc_feature 1..20: note = Synthetic
  source 1..20: mol_type = other RNA
gggccttaaacagcgtacgc

SEQ ID NO: 671 - RNA, 20 nt, synthetic construct
  misc_feature 1..20: note = Synthetic
  source 1..20: mol_type = other RNA
attggccagaagtttcgcca

SEQ ID NO: 672 - RNA, 20 nt, synthetic construct
  misc_feature 1..20: note = Synthetic
  source 1..20: mol_type = other RNA
tatacatggcttgatcagca

SEQ ID NO: 673 - RNA, 20 nt, synthetic construct
  misc_feature 1..20: note = Synthetic
  source 1..20: mol_type = other RNA
gatgtgacgccgcggcccgg

SEQ ID NO: 674 - RNA, 20 nt, synthetic construct
  misc_feature 1..20: note = Synthetic
  source 1..20: mol_type = other RNA
cggacagaagagcggccgag

SEQ ID NO: 675 - RNA, 20 nt, synthetic construct
  misc_feature 1..20: note = Synthetic
  source 1..20: mol_type = other RNA
cggctgtactgcaaaaacgg

SEQ ID NO: 676 - RNA, 20 nt, synthetic construct
  misc_feature 1..20: note = Synthetic
  source 1..20: mol_type = other RNA
gcgggtcggcactcactgtg

SEQ ID NO: 677 - RNA, 20 nt, synthetic construct
  misc_feature 1..20: note = Synthetic
  source 1..20: mol_type = other RNA
cgggtcggcactcactgtga

SEQ ID NO: 678 - RNA, 20 nt, synthetic construct
  misc_feature 1..20: note = Synthetic
  source 1..20: mol_type = other RNA
gaaatacaccagttggtatg

SEQ ID NO: 679 - RNA, 20 nt, synthetic construct
  misc_feature 1..20: note = Synthetic
  source 1..20: mol_type = other RNA
atgtggcactgaaacgaact

SEQ ID NO: 680 - RNA, 20 nt, synthetic construct
  misc_feature 1..20: note = Synthetic
  source 1..20: mol_type = other RNA
ccgggatcccgttgcaaccg

SEQ ID NO: 681 - RNA, 20 nt, synthetic construct
  misc_feature 1..20: note = Synthetic
  source 1..20: mol_type = other RNA
ttcacggatgggtgtctccg

SEQ ID NO: 682 - RNA, 20 nt, synthetic construct
  misc_feature 1..20: note = Synthetic
  source 1..20: mol_type = other RNA
attagcggacgcggtgcccg

SEQ ID NO: 683 - RNA, 20 nt, synthetic construct
  misc_feature 1..20: note = Synthetic
  source 1..20: mol_type = other RNA
gcggctgtactgcaaaaacg

SEQ ID NO: 684 - RNA, 20 nt, synthetic construct
  misc_feature 1..20: note = Synthetic
  source 1..20: mol_type = other RNA
atgtagaagatgtgacgccg

SEQ ID NO: 685 - RNA, 20 nt, synthetic construct
  misc_feature 1..20: note = Synthetic
  source 1..20: mol_type = other RNA
gggtgccagattagcggacg

SEQ ID NO: 686 - RNA, 20 nt, synthetic construct
  misc_feature 1..20: note = Synthetic
  source 1..20: mol_type = other RNA
cgggatcccgttgcaaccgc

SEQ ID NO: 687 - RNA, 20 nt, synthetic construct
  misc_feature 1..20: note = Synthetic
  source 1..20: mol_type = other RNA
cgcggttgcaacgggatccc

SEQ ID NO: 688 - RNA, 20 nt, synthetic construct
  misc_feature 1..20: note = Synthetic
  source 1..20: mol_type = other RNA
gtctccgcggacgccgcctg

SEQ ID NO: 689 - RNA, 20 nt, synthetic construct
  misc_feature 1..20: note = Synthetic
  source 1..20: mol_type = other RNA
ccccgtcaactcggccgtcg

SEQ ID NO: 690 - RNA, 20 nt, synthetic construct
  misc_feature 1..20: note = Synthetic
  source 1..20: mol_type = other RNA
gaccccgtcaactcggccgt

SEQ ID NO: 691 - RNA, 20 nt, synthetic construct
  misc_feature 1..20: note = Synthetic
  source 1..20: mol_type = other RNA
ccccgacggccgagttgacg

SEQ ID NO: 692 - RNA, 20 nt, synthetic construct
  misc_feature 1..20: note = Synthetic
  source 1..20: mol_type = other RNA
gcggtgcccgcggttgcaac

SEQ ID NO: 693 - RNA, 20 nt, synthetic construct
  misc_feature 1..20: note = Synthetic
  source 1..20: mol_type = other RNA
aagagcggccgagcggctcg

SEQ ID NO: 694 - RNA, 20 nt, synthetic construct
  misc_feature 1..20: note = Synthetic
  source 1..20: mol_type = other RNA
gctgccgccatcctcgggca

SEQ ID NO: 695 - RNA, 20 nt, synthetic construct
  misc_feature 1..20: note = Synthetic
  source 1..20: mol_type = other RNA
tccgctaatctggcacccgc

SEQ ID NO: 696 - RNA, 20 nt, synthetic construct
  misc_feature 1..20: note = Synthetic
  source 1..20: mol_type = other RNA
ccgcggttgcaacgggatcc

SEQ ID NO: 697 - RNA, 20 nt, synthetic construct
  misc_feature 1..20: note = Synthetic
  source 1..20: mol_type = other RNA
gggacctggggttcacggat

SEQ ID NO: 698 - RNA, 20 nt, synthetic construct
  misc_feature 1..20: note = Synthetic
  source 1..20: mol_type = other RNA
gacacccatccgtgaacccc

SEQ ID NO: 699 - RNA, 20 nt, synthetic construct
  misc_feature 1..20: note = Synthetic
  source 1..20: mol_type = other RNA
ttttgcagtacagccgcttg

SEQ ID NO: 700 - RNA, 20 nt, synthetic construct
  misc_feature 1..20: note = Synthetic
  source 1..20: mol_type = other RNA
ttcctgcgcatccaccccga

SEQ ID NO: 701 - RNA, 20 nt, synthetic construct
  misc_feature 1..20: note = Synthetic
  source 1..20: mol_type = other RNA
cggccgagttgacggggtcc

SEQ ID NO: 702 - RNA, 20 nt, synthetic construct
  misc_feature 1..20: note = Synthetic
  source 1..20: mol_type = other RNA
tatgtggcactgaaacgaac

SEQ ID NO: 703 - RNA, 20 nt, synthetic construct
  misc_feature 1..20: note = Synthetic
  source 1..20: mol_type = other RNA
cccggcgggtgccagattag

SEQ ID NO: 704 - RNA, 20 nt, synthetic construct
  misc_feature 1..20: note = Synthetic
  source 1..20: mol_type = other RNA
cgccggctcgccgcgcacca

SEQ ID NO: 705 - RNA, 20 nt, synthetic construct
  misc_feature 1..20: note = Synthetic
  source 1..20: mol_type = other RNA
gccggctcgccgcgcaccag

SEQ ID NO: 706 - RNA, 20 nt, synthetic construct
  misc_feature 1..20: note = Synthetic
  source 1..20: mol_type = other RNA
tcggccgctcttctgtccgc

SEQ ID NO: 707 - RNA, 20 nt, synthetic construct
  misc_feature 1..20: note = Synthetic
  source 1..20: mol_type = other RNA
cgtcaactcggccgtcgggg

SEQ ID NO: 708 - RNA, 20 nt, synthetic construct
  misc_feature 1..20: note = Synthetic
  source 1..20: mol_type = other RNA
acggccgagttgacggggtc

SEQ ID NO: 709 - RNA, 20 nt, synthetic construct
  misc_feature 1..20: note = Synthetic
  source 1..20: mol_type = other RNA
cgaactgggcagtataaact

SEQ ID NO: 710 - RNA, 20 nt, synthetic construct
  misc_feature 1..20: note = Synthetic
  source 1..20: mol_type = other RNA
atctggcacccgccgggccg

SEQ ID NO: 711 - RNA, 20 nt, synthetic construct
  misc_feature 1..20: note = Synthetic
  source 1..20: mol_type = other RNA
accccgtcaactcggccgtc

SEQ ID NO: 712 - RNA, 20 nt, synthetic construct
  misc_feature 1..20: note = Synthetic
  source 1..20: mol_type = other RNA
tctcccggaccccgtcaact

SEQ ID NO: 713 - RNA, 20 nt, synthetic construct
  misc_feature 1..20: note = Synthetic
  source 1..20: mol_type = other RNA
caccccgacggccgagttga

SEQ ID NO: 714 - RNA, 20 nt, synthetic construct
  misc_feature 1..20: note = Synthetic
  source 1..20: mol_type = other RNA
accccgacggccgagttgac

SEQ ID NO: 715 - RNA, 20 nt, synthetic construct
  misc_feature 1..20: note = Synthetic
  source 1..20: mol_type = other RNA
gaagatgtgacgccgcggcc

SEQ ID NO: 716 - RNA, 20 nt, synthetic construct
  misc_feature 1..20: note = Synthetic
  source 1..20: mol_type = other RNA
ccgctaatctggcacccgcc

SEQ ID NO: 717 - RNA, 20 nt, synthetic construct
  misc_feature 1..20: note = Synthetic
  source 1..20: mol_type = other RNA
cgcggtgcccgcggttgcaa

SEQ ID NO: 718 - RNA, 20 nt, synthetic construct
  misc_feature 1..20: note = Synthetic
  source 1..20: mol_type = other RNA
ctctccccaggcggcgtccg

SEQ ID NO: 719 - RNA, 20 nt, synthetic construct
  misc_feature 1..20: note = Synthetic
  source 1..20: mol_type = other RNA
cggccgagcggctcgaggct

SEQ ID NO: 720 - RNA, 20 nt, synthetic construct
  misc_feature 1..20: note = Synthetic
  source 1..20: mol_type = other RNA
gccgcttggggtccttgaag

SEQ ID NO: 721 - RNA, 20 nt, synthetic construct
  misc_feature 1..20: note = Synthetic
  source 1..20: mol_type = other RNA
tgtggtgaatgtcccgtgcg

SEQ ID NO: 722 - RNA, 20 nt, synthetic construct
  misc_feature 1..20: note = Synthetic
  source 1..20: mol_type = other RNA
tgaggaatgatcccattcgg

SEQ ID NO: 723 - RNA, 20 nt, synthetic construct
  misc_feature 1..20: note = Synthetic
  source 1..20: mol_type = other RNA
ccagtggctaaagcacatcg

SEQ ID NO: 724 - RNA, 20 nt, synthetic construct
  misc_feature 1..20: note = Synthetic
  source 1..20: mol_type = other RNA
caaccgcacccgcatcacag

SEQ ID NO: 725 - RNA, 20 nt, synthetic construct
  misc_feature 1..20: note = Synthetic
  source 1..20: mol_type = other RNA
gcatggttgaccgttctgga

SEQ ID NO: 726 - RNA, 20 nt, synthetic construct
  misc_feature 1..20: note = Synthetic
  source 1..20: mol_type = other RNA
gtgaagctaaccagtctgcg

SEQ ID NO: 727 - RNA, 20 nt, synthetic construct
  misc_feature 1..20: note = Synthetic
  source 1..20: mol_type = other RNA
gaactccacgttgctaccca

SEQ ID NO: 728 - RNA, 20 nt, synthetic construct
  misc_feature 1..20: note = Synthetic
  source 1..20: mol_type = other RNA
aggaaaccatccatggtcga

SEQ ID NO: 729 - RNA, 20 nt, synthetic construct
  misc_feature 1..20: note = Synthetic
  source 1..20: mol_type = other RNA
gagctctacgtgctcctcag

SEQ ID NO: 730 - RNA, 20 nt, synthetic construct
  misc_feature 1..20: note = Synthetic
  source 1..20: mol_type = other RNA
ggaagacctggaccgcatcg

SEQ ID NO: 731 - RNA, 20 nt, synthetic construct
  misc_feature 1..20: note = Synthetic
  source 1..20: mol_type = other RNA
ttcctccaaggaaaccggtg

SEQ ID NO: 732 - RNA, 20 nt, synthetic construct
  misc_feature 1..20: note = Synthetic
  source 1..20: mol_type = other RNA
ggcccagcagccatcgacca

SEQ ID NO: 733 - RNA, 20 nt, synthetic construct
  misc_feature 1..20: note = Synthetic
  source 1..20: mol_type = other RNA
gcgcctctactgcatggatg

SEQ ID NO: 734 - RNA, 20 nt, synthetic construct
  misc_feature 1..20: note = Synthetic
  source 1..20: mol_type = other RNA
atactccacgatgacataca

SEQ ID NO: 735 - RNA, 20 nt, synthetic construct
  misc_feature 1..20: note = Synthetic
  source 1..20: mol_type = other RNA
acccaaccgtgtgaccaaag

SEQ ID NO: 736 - RNA, 20 nt, synthetic construct
  misc_feature 1..20: note = Synthetic
  source 1..20: mol_type = other RNA
cgcaggggagtatacgtgct

SEQ ID NO: 737 - RNA, 20 nt, synthetic construct
  misc_feature 1..20: note = Synthetic
  source 1..20: mol_type = other RNA
gaaggagaccactgtctcgg

SEQ ID NO: 738 - RNA, 20 nt, synthetic construct
  misc_feature 1..20: note = Synthetic
  source 1..20: mol_type = other RNA
gttgcccgccaacaaaacag

SEQ ID NO: 739 - RNA, 20 nt, synthetic construct
  misc_feature 1..20: note = Synthetic
  source 1..20: mol_type = other RNA
accggcccatcctgcaagca

SEQ ID NO: 740 - RNA, 20 nt, synthetic construct
  misc_feature 1..20: note = Synthetic
  source 1..20: mol_type = other RNA
ttttcaaccagcgcagtgtg

SEQ ID NO: 741 - RNA, 20 nt, synthetic construct
  misc_feature 1..20: note = Synthetic
  source 1..20: mol_type = other RNA
cagcagccatcgaccatgga

SEQ ID NO: 742 - RNA, 20 nt, synthetic construct
  misc_feature 1..20: note = Synthetic
  source 1..20: mol_type = other RNA
atccatgcagtagaggcgct

SEQ ID NO: 743 - RNA, 20 nt, synthetic construct
  misc_feature 1..20: note = Synthetic
  source 1..20: mol_type = other RNA
tgcccagcgcctctactgca

SEQ ID NO: 744 - RNA, 20 nt, synthetic construct
  misc_feature 1..20: note = Synthetic
  source 1..20: mol_type = other RNA
atcgtggagtatgcctccaa

SEQ ID NO: 745 - RNA, 20 nt, synthetic construct
  misc_feature 1..20: note = Synthetic
  source 1..20: mol_type = other RNA
gagcatccctctgcgcagac

SEQ ID NO: 746 - RNA, 20 nt, synthetic construct
  misc_feature 1..20: note = Synthetic
  source 1..20: mol_type = other RNA
atactcccctgcgtcctcaa

SEQ ID NO: 747 - RNA, 20 nt, synthetic construct
  misc_feature 1..20: note = Synthetic
  source 1..20: mol_type = other RNA
caacgtggagttcatgtgta

SEQ ID NO: 748 - RNA, 20 nt, synthetic construct
  misc_feature 1..20: note = Synthetic
  source 1..20: mol_type = other RNA
ggtgtagttgcccttgtcag

SEQ ID NO: 749 - RNA, 20 nt, synthetic construct
  misc_feature 1..20: note = Synthetic
  source 1..20: mol_type = other RNA
atttttcaaccagcgcagtg

SEQ ID NO: 750 - RNA, 20 nt, synthetic construct
  misc_feature 1..20: note = Synthetic
  source 1..20: mol_type = other RNA
aagcatctcaccgaaatccc

SEQ ID NO: 751 - RNA, 20 nt, synthetic construct
  misc_feature 1..20: note = Synthetic
  source 1..20: mol_type = other RNA
tccccgaccttgcctgaaca

SEQ ID NO: 752 - RNA, 20 nt, synthetic construct
  misc_feature 1..20: note = Synthetic
  source 1..20: mol_type = other RNA
cggcctagcggtgcagagtg

SEQ ID NO: 753 - RNA, 20 nt, synthetic construct
  misc_feature 1..20: note = Synthetic
  source 1..20: mol_type = other RNA
gtttcctccaaggaaaccgg

SEQ ID NO: 754 - RNA, 20 nt, synthetic construct
  misc_feature 1..20: note = Synthetic
  source 1..20: mol_type = other RNA
agcgcctctactgcatggat

SEQ ID NO: 755 - RNA, 20 nt, synthetic construct
  misc_feature 1..20: note = Synthetic
  source 1..20: mol_type = other RNA
catttgcaggtggtctttcg

SEQ ID NO: 756 - RNA, 20 nt, synthetic construct
  misc_feature 1..20: note = Synthetic
  source 1..20: mol_type = other RNA
tagcagactttggcctcgca

SEQ ID NO: 757 - RNA, 20 nt, synthetic construct
  misc_feature 1..20: note = Synthetic
  source 1..20: mol_type = other RNA
tactccacgatgacatacaa

SEQ ID NO: 758 - RNA, 20 nt, synthetic construct
  misc_feature 1..20: note = Synthetic
  source 1..20: mol_type = other RNA
tcagagacccctgctagcat

SEQ ID NO: 759 - RNA, 20 nt, synthetic construct
  misc_feature 1..20: note = Synthetic
  source 1..20: mol_type = other RNA
gatgaccgaccccaccatgc

SEQ ID NO: 760 - RNA, 20 nt, synthetic construct
  misc_feature 1..20: note = Synthetic
  source 1..20: mol_type = other RNA
agtgtctcacgcatacggtt

SEQ ID NO: 761 - RNA, 20 nt, synthetic construct
  misc_feature 1..20: note = Synthetic
  source 1..20: mol_type = other RNA
cagccacactctgcaccgct

SEQ ID NO: 762 - RNA, 20 nt, synthetic construct
  misc_feature 1..20: note = Synthetic
  source 1..20: mol_type = other RNA
gaagacggaatcctcccctg

SEQ ID NO: 763 - RNA, 20 nt, synthetic construct
  misc_feature 1..20: note = Synthetic
  source 1..20: mol_type = other RNA
tcctcgggcttacagctcgt

SEQ ID NO: 764 - RNA, 20 nt, synthetic construct
  misc_feature 1..20: note = Synthetic
  source 1..20: mol_type = other RNA
gatccggtcaaataatgcct

SEQ ID NO: 765 - RNA, 20 nt, synthetic construct
  misc_feature 1..20: note = Synthetic
  source 1..20: mol_type = other RNA
aggtcccttgtatgtcatcg

SEQ ID NO: 766 - RNA, 20 nt, synthetic construct
  misc_feature 1..20: note = Synthetic
  source 1..20: mol_type = other RNA
aagtattattacctgtcccg

SEQ ID NO: 767 - RNA, 20 nt, synthetic construct
  misc_feature 1..20: note = Synthetic
  source 1..20: mol_type = other RNA
gtgggactcccatgctagca

SEQ ID NO: 768 - RNA, 20 nt, synthetic construct
  misc_feature 1..20: note = Synthetic
  source 1..20: mol_type = other RNA
ttggtttgttccagcattcg

SEQ ID NO: 769 - RNA, 20 nt, synthetic construct
  misc_feature 1..20: note = Synthetic
  source 1..20: mol_type = other RNA
atggtggtagtagcaaccaa

SEQ ID NO: 770 - RNA, 20 nt, synthetic construct
  misc_feature 1..20: note = Synthetic
  source 1..20: mol_type = other RNA
tatgtaatgcagcagccgtg

SEQ ID NO: 771 - RNA, 20 nt, synthetic construct
  misc_feature 1..20: note = Synthetic
  source 1..20: mol_type = other RNA
ggtagtagcaaccaacggga

SEQ ID NO: 772 - RNA, 20 nt, synthetic construct
  misc_feature 1..20: note = Synthetic
  source 1..20: mol_type = other RNA
ggccatcgccaatgactcag

SEQ ID NO: 773 - RNA, 20 nt, synthetic construct
  misc_feature 1..20: note = Synthetic
  source 1..20: mol_type = other RNA
tggtggtagtagcaaccaac

SEQ ID NO: 774 - RNA, 20 nt, synthetic construct
  misc_feature 1..20: note = Synthetic
  source 1..20: mol_type = other RNA
cttcttcagaaccttcccgt

SEQ ID NO: 775 - RNA, 20 nt, synthetic construct
  misc_feature 1..20: note = Synthetic
  source 1..20: mol_type = other RNA
agctatggcccactccatga

SEQ ID NO: 776 - RNA, 20 nt, synthetic construct
  misc_feature 1..20: note = Synthetic
  source 1..20: mol_type = other RNA
agccgtgaggtactgatcat

SEQ ID NO: 777 - RNA, 20 nt, synthetic construct
  misc_feature 1..20: note = Synthetic
  source 1..20: mol_type = other RNA
gagatacccaaaaccatcac

SEQ ID NO: 778 - RNA, 20 nt, synthetic construct
  misc_feature 1..20: note = Synthetic
  source 1..20: mol_type = other RNA
ctcgaattatactttgattg

SEQ ID NO: 779 - RNA, 20 nt, synthetic construct
  misc_feature 1..20: note = Synthetic
  source 1..20: mol_type = other RNA
gatactggaaaaccaggcgt

SEQ ID NO: 780 - RNA, 20 nt, synthetic construct
  misc_feature 1..20: note = Synthetic
  source 1..20: mol_type = other RNA
tttgattgagggcgtcattc

SEQ ID NO: 781 - RNA, 20 nt, synthetic construct
  misc_feature 1..20: note = Synthetic
  source 1..20: mol_type = other RNA
gctctccttgaaggtaagct

SEQ ID NO: 782 - RNA, 20 nt, synthetic construct
  misc_feature 1..20: note = Synthetic
  source 1..20: mol_type = other RNA
tgagactccagacctacgcc

SEQ ID NO: 783 - RNA, 20 nt, synthetic construct
  misc_feature 1..20: note = Synthetic
  source 1..20: mol_type = other RNA
gggtgcttataagtcatcaa

SEQ ID NO: 784 - RNA, 20 nt, synthetic construct
  misc_feature 1..20: note = Synthetic
  source 1..20: mol_type = other RNA
gcacccatgtcaaatttcac

SEQ ID NO: 785 - RNA, 20 nt, synthetic construct
  misc_feature 1..20: note = Synthetic
  source 1..20: mol_type = other RNA
ttcctctgagtcattggcga

SEQ ID NO: 786 - RNA, 20 nt, synthetic construct
  misc_feature 1..20: note = Synthetic
  source 1..20: mol_type = other RNA
ggctgctgcattacataatc

SEQ ID NO: 787 - RNA, 20 nt, synthetic construct
  misc_feature 1..20: note = Synthetic
  source 1..20: mol_type = other RNA
catggccacaacaactgacg

SEQ ID NO: 788 - RNA, 20 nt, synthetic construct
  misc_feature 1..20: note = Synthetic
  source 1..20: mol_type = other RNA
gtgcagttcagtgatcgtac

SEQ ID NO: 789 - RNA, 20 nt, synthetic construct
  misc_feature 1..20: note = Synthetic
  source 1..20: mol_type = other RNA
cttcgacacatgggataacg

SEQ ID NO: 790 - RNA, 20 nt, synthetic construct
  misc_feature 1..20: note = Synthetic
  source 1..20: mol_type = other RNA
gatcactgaactgcacgctc

SEQ ID NO: 791 - RNA, 20 nt, synthetic construct
  misc_feature 1..20: note = Synthetic
  source 1..20: mol_type = other RNA
ggtggtcggagattcgtagc

SEQ ID NO: 792 - RNA, 20 nt, synthetic construct
  misc_feature 1..20: note = Synthetic
  source 1..20: mol_type = other RNA
tccgaccaccactacagcaa

SEQ ID NO: 793 - RNA, 20 nt, synthetic construct
  misc_feature 1..20: note = Synthetic
  source 1..20: mol_type = other RNA
ctccgaccaccactacagca

SEQ ID NO: 794 - RNA, 20 nt, synthetic construct
  misc_feature 1..20: note = Synthetic
  source 1..20: mol_type = other RNA
gaggtgctgatgtaccagtt

SEQ ID NO: 795 - RNA, 20 nt, synthetic construct
  misc_feature 1..20: note = Synthetic
  source 1..20: mol_type = other RNA
cttatcatctttcaacacgc

SEQ ID NO: 796 - RNA, 20 nt, synthetic construct
  misc_feature 1..20: note = Synthetic
  source 1..20: mol_type = other RNA
atcactgaactgcacgctcc

SEQ ID NO: 797 - RNA, 20 nt, synthetic construct
  misc_feature 1..20: note = Synthetic
  source 1..20: mol_type = other RNA
atcatttcactggcgagctc

SEQ ID NO: 798 - RNA, 20 nt, synthetic construct
  misc_feature 1..20: note = Synthetic
  source 1..20: mol_type = other RNA
aacctatcttcttcgacaca

SEQ ID NO: 799 - RNA, 20 nt, synthetic construct
  misc_feature 1..20: note = Synthetic
  source 1..20: mol_type = other RNA
tggtgaagtcagttatatcc

SEQ ID NO: 800 - RNA, 20 nt, synthetic construct
  misc_feature 1..20: note = Synthetic
  source 1..20: mol_type = other RNA
agaggtgctgatgtaccagt

SEQ ID NO: 801 - RNA, 20 nt, synthetic construct
  misc_feature 1..20: note = Synthetic
  source 1..20: mol_type = other RNA
catctttcaacacgcaggac

SEQ ID NO: 802 - RNA, 20 nt, synthetic construct
  misc_feature 1..20: note = Synthetic
  source 1..20: mol_type = other RNA
gcaggccgcgtcagttgttg

SEQ ID NO: 803 - RNA, 20 nt, synthetic construct
  misc_feature 1..20: note = Synthetic
  source 1..20: mol_type = other RNA
agttatatcctggccgcctt

SEQ ID NO: 804 - RNA, 20 nt, synthetic construct
  misc_feature 1..20: note = Synthetic
  source 1..20: mol_type = other RNA
tgatgtaccagttggggaac

SEQ ID NO: 805 - RNA, 20 nt, synthetic construct
  misc_feature 1..20: note = Synthetic
  source 1..20: mol_type = other RNA
tgataagcccactctacagc

SEQ ID NO: 806 - RNA, 20 nt, synthetic construct
  misc_feature 1..20: note = Synthetic
  source 1..20: mol_type = other RNA
ttcaggacattactattgcg

SEQ ID NO: 807 - RNA, 20 nt, synthetic construct
  misc_feature 1..20: note = Synthetic
  source 1..20: mol_type = other RNA
tggggctatccgctggtcag

SEQ ID NO: 808 - RNA, 20 nt, synthetic construct
  misc_feature 1..20: note = Synthetic
  source 1..20: mol_type = other RNA
gtgtaaagtcccctgaccag

SEQ ID NO: 809 - RNA, 20 nt, synthetic construct
  misc_feature 1..20: note = Synthetic
  source 1..20: mol_type = other RNA
tggtcaggggactttacaca

SEQ ID NO: 810 - RNA, 20 nt, synthetic construct
  misc_feature 1..20: note = Synthetic
  source 1..20: mol_type = other RNA
atggggctatccgctggtca

SEQ ID NO: 811 - RNA, 20 nt, synthetic construct
  misc_feature 1..20: note = Synthetic
  source 1..20: mol_type = other RNA
accacatgccagtccagcga

SEQ ID NO: 812 - RNA, 20 nt, synthetic construct
  misc_feature 1..20: note = Synthetic
  source 1..20: mol_type = other RNA
acttctccatgctacccgag

SEQ ID NO: 813 - RNA, 20 nt, synthetic construct
  misc_feature 1..20: note = Synthetic
  source 1..20: mol_type = other RNA
tggaagggatgactacgttg

SEQ ID NO: 814 - RNA, 20 nt, synthetic construct
  misc_feature 1..20: note = Synthetic
  source 1..20: mol_type = other RNA
agaaacatggggctatccgc

SEQ ID NO: 815 - RNA, 20 nt, synthetic construct
  misc_feature 1..20: note = Synthetic
  source 1..20: mol_type = other RNA
gaaggtgaccgtcgctggac

SEQ ID NO: 816 - RNA, 20 nt, synthetic construct
  misc_feature 1..20: note = Synthetic
  source 1..20: mol_type = other RNA
aagcagaaactacccgttgc

SEQ ID NO: 817 - RNA, 20 nt, synthetic construct
  misc_feature 1..20: note = Synthetic
  source 1..20: mol_type = other RNA
gcaagcaatatcctattacc

SEQ ID NO: 818 - RNA, 20 nt, synthetic construct
  misc_feature 1..20: note = Synthetic
  source 1..20: mol_type = other RNA
gagcccagctaatgagacaa

SEQ ID NO: 819 - RNA, 20 nt, synthetic construct
  misc_feature 1..20: note = Synthetic
  source 1..20: mol_type = other RNA
ctggtcaggggactttacac

SEQ ID NO: 820 - RNA, 20 nt, synthetic construct
  misc_feature 1..20: note = Synthetic
  source 1..20: mol_type = other RNA
gaggcttgttctgtagatac

SEQ ID NO: 821 - RNA, 20 nt, synthetic construct
  misc_feature 1..20: note = Synthetic
  source 1..20: mol_type = other RNA
caagcaatatcctattaccc

SEQ ID NO: 822 - RNA, 20 nt, synthetic construct
  misc_feature 1..20: note = Synthetic
  source 1..20: mol_type = other RNA
atacagtatatatgcgtcat

SEQ ID NO: 823 - RNA, 20 nt, synthetic construct
  misc_feature 1..20: note = Synthetic
  source 1..20: mol_type = other RNA
tagatgaaggtgaccgtcgc

SEQ ID NO: 824 - RNA, 20 nt, synthetic construct
  misc_feature 1..20: note = Synthetic
  source 1..20: mol_type = other RNA
catggggctatccgctggtc

SEQ ID NO: 825 - RNA, 20 nt, synthetic construct
  misc_feature 1..20: note = Synthetic
  source 1..20: mol_type = other RNA
gagaggctcacgtgcctctc

SEQ ID NO: 826 - RNA, 20 nt, synthetic construct
  misc_feature 1..20: note = Synthetic
  source 1..20: mol_type = other RNA
gacattactattgcgtggta

SEQ ID NO: 827 - RNA, 20 nt, synthetic construct
  misc_feature 1..20: note = Synthetic
  source 1..20: mol_type = other RNA
tatggaagggatgactacgt

SEQ ID NO: 828 - RNA, 20 nt, synthetic construct
  misc_feature 1..20: note = Synthetic
  source 1..20: mol_type = other RNA
atggaagggatgactacgtt

SEQ ID NO: 829 - RNA, 20 nt, synthetic construct
  misc_feature 1..20: note = Synthetic
  source 1..20: mol_type = other RNA
tagtggctggtgacagtaac

SEQ ID NO: 830 - RNA, 20 nt, synthetic construct
  misc_feature 1..20: note = Synthetic
  source 1..20: mol_type = other RNA
ctacccgttgcaggagacgg

SEQ ID NO: 831 - RNA, 20 nt, synthetic construct
  misc_feature 1..20: note = Synthetic
  source 1..20: mol_type = other RNA
agtaagcaatgtcactcaac

SEQ ID NO: 832 - RNA, 20 nt, synthetic construct
  misc_feature 1..20: note = Synthetic
  source 1..20: mol_type = other RNA
aatagtcttcccctagcact

SEQ ID NO: 833 - RNA, 20 nt, synthetic construct
  misc_feature 1..20: note = Synthetic
  source 1..20: mol_type = other RNA
cacgtgcctctcgggtagca

SEQ ID NO: 834 - RNA, 20 nt, synthetic construct
  misc_feature 1..20: note = Synthetic
  source 1..20: mol_type = other RNA
cctgaatcctccaccttagc

SEQ ID NO: 835 - RNA, 20 nt, synthetic construct
  misc_feature 1..20: note = Synthetic
  source 1..20: mol_type = other RNA
aattctattacccgggtaat

SEQ ID NO: 836 - RNA, 20 nt, synthetic construct
  misc_feature 1..20: note = Synthetic
  source 1..20: mol_type = other RNA
gggtagtttctgcttaaata

SEQ ID NO: 837 - RNA, 20 nt, synthetic construct
  misc_feature 1..20: note = Synthetic
  source 1..20: mol_type = other RNA
agttgagtgacattgcttac

SEQ ID NO: 838 - RNA, 20 nt, synthetic construct
  misc_feature 1..20: note = Synthetic
  source 1..20: mol_type = other RNA
taatagtcttcccctagcac

SEQ ID NO: 839 - RNA, 20 nt, synthetic construct
  misc_feature 1..20: note = Synthetic
  source 1..20: mol_type = other RNA
ttaatgaatttaatcgattc

SEQ ID NO: 840 - RNA, 20 nt, synthetic construct
  misc_feature 1..20: note = Synthetic
  source 1..20: mol_type = other RNA
gtctggatcacgttcaaagg

SEQ ID NO: 841 - RNA, 20 nt, synthetic construct
  misc_feature 1..20: note = Synthetic
  source 1..20: mol_type = other RNA
atagtcggtttgacactgga

SEQ ID NO: 842 - RNA, 20 nt, synthetic construct
  misc_feature 1..20: note = Synthetic
  source 1..20: mol_type = other RNA
actggggactagacaccatg

SEQ ID NO: 843 - RNA, 20 nt, synthetic construct
  misc_feature 1..20: note = Synthetic
  source 1..20: mol_type = other RNA
ccagaacgctgcgatgactg

SEQ ID NO: 844 - RNA, 20 nt, synthetic construct
  misc_feature 1..20: note = Synthetic
  source 1..20: mol_type = other RNA
cattctccaaaactccacgg

SEQ ID NO: 845 - RNA, 20 nt, synthetic construct
  misc_feature 1..20: note = Synthetic
  source 1..20: mol_type = other RNA
gacgttgatgttgccccgag

SEQ ID NO: 846 - RNA, 20 nt, synthetic construct
  misc_feature 1..20: note = Synthetic
  source 1..20: mol_type = other RNA
cggtctagcagtgatgagca

SEQ ID NO: 847 - RNA, 20 nt, synthetic construct
  misc_feature 1..20: note = Synthetic
  source 1..20: mol_type = other RNA
ccttactaatgcggttctcg

SEQ ID NO: 848 - RNA, 20 nt, synthetic construct
  misc_feature 1..20: note = Synthetic
  source 1..20: mol_type = other RNA
ctagaaaatatggcctctcg

SEQ ID NO: 849 - RNA, 20 nt, synthetic construct
  misc_feature 1..20: note = Synthetic
  source 1..20: mol_type = other RNA
agtgatagtcggtttgacac

SEQ ID NO: 850 - RNA, 20 nt, synthetic construct
  misc_feature 1..20: note = Synthetic
  source 1..20: mol_type = other RNA
tctgatggattctcgcaatg

SEQ ID NO: 851 - RNA, 20 nt, synthetic construct
  misc_feature 1..20: note = Synthetic
  source 1..20: mol_type = other RNA
tttgtattactgaccctccg

SEQ ID NO: 852 - RNA, 20 nt, synthetic construct
  misc_feature 1..20: note = Synthetic
  source 1..20: mol_type = other RNA
agccccaactacgtgctcca

SEQ ID NO: 853 - RNA, 20 nt, synthetic construct
  misc_feature 1..20: note = Synthetic
  source 1..20: mol_type = other RNA
gcacaatgtccaagcaccga

SEQ ID NO: 854 - RNA, 20 nt, synthetic construct
  misc_feature 1..20: note = Synthetic
  source 1..20: mol_type = other RNA
agtgggcacttgatgcgagc

SEQ ID NO: 855 - RNA, 20 nt, synthetic construct
  misc_feature 1..20: note = Synthetic
  source 1..20: mol_type = other RNA
atcaggctaccttaacatgc

SEQ ID NO: 856 - RNA, 20 nt, synthetic construct
  misc_feature 1..20: note = Synthetic
  source 1..20: mol_type = other RNA
ggagctactcattccctgta

SEQ ID NO: 857 - RNA, 20 nt, synthetic construct
  misc_feature 1..20: note = Synthetic
  source 1..20: mol_type = other RNA
ttgatgtcaccattaacgaa

SEQ ID NO: 858 - RNA, 20 nt, synthetic construct
  misc_feature 1..20: note = Synthetic
  source 1..20: mol_type = other RNA
ttgaccgagacagtctgcct

SEQ ID NO: 859 - RNA, 20 nt, synthetic construct
  misc_feature 1..20: note = Synthetic
  source 1..20: mol_type = other RNA
ggcacaatgtccaagcaccg

SEQ ID NO: 860 - RNA, 20 nt, synthetic construct
  misc_feature 1..20: note = Synthetic
  source 1..20: mol_type = other RNA
cagctggccttactctgatc

SEQ ID NO: 861 - RNA, 20 nt, synthetic construct
  misc_feature 1..20: note = Synthetic
  source 1..20: mol_type = other RNA
tactaatgcggttctcgggg

SEQ ID NO: 862 - RNA, 20 nt, synthetic construct
  misc_feature 1..20: note = Synthetic
  source 1..20: mol_type = other RNA
aaactaaaatagaccgtaca

SEQ ID NO: 863 - RNA, 20 nt, synthetic construct
  misc_feature 1..20: note = Synthetic
  source 1..20: mol_type = other RNA
gatctggtattggactaggc

SEQ ID NO: 864 - RNA, 20 nt, synthetic construct
  misc_feature 1..20: note = Synthetic
  source 1..20: mol_type = other RNA
accgactatcacttggtata

SEQ ID NO: 865 - RNA, 20 nt, synthetic construct
  misc_feature 1..20: note = Synthetic
  source 1..20: mol_type = other RNA
attctccaaaactccacgga

SEQ ID NO: 866 - RNA, 20 nt, synthetic construct
  misc_feature 1..20: note = Synthetic
  source 1..20: mol_type = other RNA
ttccctggagcacgtagttg

SEQ ID NO: 867 - RNA, 20 nt, synthetic construct
  misc_feature 1..20: note = Synthetic
  source 1..20: mol_type = other RNA
gcggtctagcagtgatgagc

SEQ ID NO: 868 - RNA, 20 nt, synthetic construct
  misc_feature 1..20: note = Synthetic
  source 1..20: mol_type = other RNA
cattgccaccaagctcattg

SEQ ID NO: 869 - RNA, 20 nt, synthetic construct
  misc_feature 1..20: note = Synthetic
  source 1..20: mol_type = other RNA
gtattggactaggcaggacc

SEQ ID NO: 870 - RNA, 20 nt, synthetic construct
  misc_feature 1..20: note = Synthetic
  source 1..20: mol_type = other RNA
taggcaggaccgggaccttg

SEQ ID NO: 871 - RNA, 20 nt, synthetic construct
  misc_feature 1..20: note = Synthetic
  source 1..20: mol_type = other RNA
tggattctcgcaatgaggtt

SEQ ID NO: 872 - RNA, 20 nt, synthetic construct
  misc_feature 1..20: note = Synthetic
  source 1..20: mol_type = other RNA
tcagtctggatcacgttcaa

SEQ ID NO: 873 - RNA, 20 nt, synthetic construct
  misc_feature 1..20: note = Synthetic
  source 1..20: mol_type = other RNA
ggtgcttggacattgtgcct

SEQ ID NO: 874 - RNA, 20 nt, synthetic construct
  misc_feature 1..20: note = Synthetic
  source 1..20: mol_type = other RNA
ggaggacttccctcggtgct

SEQ ID NO: 875 - RNA, 20 nt, synthetic construct
  misc_feature 1..20: note = Synthetic
  source 1..20: mol_type = other RNA
ccccgagaaccgcattagta

SEQ ID NO: 876 - RNA, 20 nt, synthetic construct
  misc_feature 1..20: note = Synthetic
  source 1..20: mol_type = other RNA
tatagttgccagtgtcattg

SEQ ID NO: 877 - RNA, 20 nt, synthetic construct
  misc_feature 1..20: note = Synthetic
  source 1..20: mol_type = other RNA
gacgtacgtttcatctcacc

SEQ ID NO: 878 - RNA, 20 nt, synthetic construct
  misc_feature 1..20: note = Synthetic
  source 1..20: mol_type = other RNA
gatccagactgatgtcagac

SEQ ID NO: 879 - RNA, 20 nt, synthetic construct
  misc_feature 1..20: note = Synthetic
  source 1..20: mol_type = other RNA
gggagcagggggttccaatc

SEQ ID NO: 880 - RNA, 20 nt, synthetic construct
  misc_feature 1..20: note = Synthetic
  source 1..20: mol_type = other RNA
tccagaacgctgcgatgact

SEQ ID NO: 881 - RNA, 20 nt, synthetic construct
  misc_feature 1..20: note = Synthetic
  source 1..20: mol_type = other RNA
gcaactatacctgcatgtta

SEQ ID NO: 882 - RNA, 20 nt, synthetic construct
  misc_feature 1..20: note = Synthetic
  source 1..20: mol_type = other RNA
cccatgatacctttcgttaa

SEQ ID NO: 883 - RNA, 20 nt, synthetic construct
  misc_feature 1..20: note = Synthetic
  source 1..20: mol_type = other RNA
tttgaccgagacagtctgcc

SEQ ID NO: 884 - RNA, 20 nt, synthetic construct
  misc_feature 1..20: note = Synthetic
  source 1..20: mol_type = other RNA
agttggggcttagaacaacc

SEQ ID NO: 885 - RNA, 20 nt, synthetic construct
  misc_feature 1..20: note = Synthetic
  source 1..20: mol_type = other RNA
ggttccctggagcacgtagt

SEQ ID NO: 886 - RNA, 20 nt, synthetic construct
  misc_feature 1..20: note = Synthetic
  source 1..20: mol_type = other RNA
cggtgctcacggtcattaaa

SEQ ID NO: 887 - RNA, 20 nt, synthetic construct
  misc_feature 1..20: note = Synthetic
  source 1..20: mol_type = other RNA
tcatcactgctagaccgcct

SEQ ID NO: 888 - RNA, 20 nt, synthetic construct
  misc_feature 1..20: note = Synthetic
  source 1..20: mol_type = other RNA
actgctgtgcagtcgcaccc

SEQ ID NO: 889 - RNA, 20 nt, synthetic construct
  misc_feature 1..20: note = Synthetic
  source 1..20: mol_type = other RNA
tgggctttgtaggcgagtcg

SEQ ID NO: 890 - RNA, 20 nt, synthetic construct
  misc_feature 1..20: note = Synthetic
  source 1..20: mol_type = other RNA
tgtgccggcaactttgtcca

SEQ ID NO: 891 - RNA, 20 nt, synthetic construct
  misc_feature 1..20: note = Synthetic
  source 1..20: mol_type = other RNA
gggacggcttcttaccttgg

SEQ ID NO: 892 - RNA, 20 nt, synthetic construct
  misc_feature 1..20: note = Synthetic
  source 1..20: mol_type = other RNA
gctttgtaggcgagtcgagg

SEQ ID NO: 893 - RNA, 20 nt, synthetic construct
  misc_feature 1..20: note = Synthetic
  source 1..20: mol_type = other RNA
ggaagccaaccagagtacgt

SEQ ID NO: 894 - RNA, 20 nt, synthetic construct
  misc_feature 1..20: note = Synthetic
  source 1..20: mol_type = other RNA
agttgccggcacatgctagc

SEQ ID NO: 895 - RNA, 20 nt, synthetic construct
  misc_feature 1..20: note = Synthetic
  source 1..20: mol_type = other RNA
tgatatcgcacttgtgtccg

SEQ ID NO: 896 - RNA, 20 nt, synthetic construct
  misc_feature 1..20: note = Synthetic
  source 1..20: mol_type = other RNA
gttttccaacgtactctggt

SEQ ID NO: 897 - RNA, 20 nt, synthetic construct
  misc_feature 1..20: note = Synthetic
  source 1..20: mol_type = other RNA
gatgtctgttacggtcaact

SEQ ID NO: 898 - RNA, 20 nt, synthetic construct
  misc_feature 1..20: note = Synthetic
  source 1..20: mol_type = other RNA
tgagaaggacactcgctgcc

SEQ ID NO: 899 - RNA, 20 nt, synthetic construct
  misc_feature 1..20: note = Synthetic
  source 1..20: mol_type = other RNA
gtgtccgtggacaaagttgc

SEQ ID NO: 900 - RNA, 20 nt, synthetic construct
  misc_feature 1..20: note = Synthetic
  source 1..20: mol_type = other RNA
gtaggcgagtcgaggtggaa

SEQ ID NO: 901 - RNA, 20 nt, synthetic construct
  misc_feature 1..20: note = Synthetic
  source 1..20: mol_type = other RNA
tgtaggcgagtcgaggtgga

SEQ ID NO: 902 - RNA, 20 nt, synthetic construct
  misc_feature 1..20: note = Synthetic
  source 1..20: mol_type = other RNA
acggctcgacaggaacctct

SEQ ID NO: 903 - RNA, 20 nt, synthetic construct
  misc_feature 1..20: note = Synthetic
  source 1..20: mol_type = other RNA
caagtgcgatatcaccttac

SEQ ID NO: 904 - RNA, 20 nt, synthetic construct
  misc_feature 1..20: note = Synthetic
  source 1..20: mol_type = other RNA
gattcctgaaacggctcgac

SEQ ID NO: 905 - RNA, 20 nt, synthetic construct
  misc_feature 1..20: note = Synthetic
  source 1..20: mol_type = other RNA
cgactgcacagcagttccac

SEQ ID NO: 906 - RNA, 20 nt, synthetic construct
  misc_feature 1..20: note = Synthetic
  source 1..20: mol_type = other RNA
agaagttttccaacgtactc

SEQ ID NO: 907 - RNA, 20 nt, synthetic construct
  misc_feature 1..20: note = Synthetic
  source 1..20: mol_type = other RNA
aacggctcgacaggaacctc

SEQ ID NO: 908 - RNA, 20 nt, synthetic construct
  misc_feature 1..20: note = Synthetic
  source 1..20: mol_type = other RNA
caactcggtgcacagagtct

SEQ ID NO: 909 - RNA, 20 nt, synthetic construct
  misc_feature 1..20: note = Synthetic
  source 1..20: mol_type = other RNA
ggttcctgtcgagccgtttc

SEQ ID NO: 910 - RNA, 20 nt, synthetic construct
  misc_feature 1..20: note = Synthetic
  source 1..20: mol_type = other RNA
agctgatccgattcctgaaa

SEQ ID NO: 911 - RNA, 20 nt, synthetic construct
  misc_feature 1..20: note = Synthetic
  source 1..20: mol_type = other RNA
tgtcgagccgtttcaggaat

SEQ ID NO: 912 - RNA, 20 nt, synthetic construct
  misc_feature 1..20: note = Synthetic
  source 1..20: mol_type = other RNA
attcgttctgaagaggtgag

SEQ ID NO: 913 - RNA, 20 nt, synthetic construct
  misc_feature 1..20: note = Synthetic
  source 1..20: mol_type = other RNA
caaattcggtacatcctcga

SEQ ID NO: 914 - RNA, 20 nt, synthetic construct
  misc_feature 1..20: note = Synthetic
  source 1..20: mol_type = other RNA
cattccctcaacttggtgtg

SEQ ID NO: 915 - RNA, 20 nt, synthetic construct
  misc_feature 1..20: note = Synthetic
  source 1..20: mol_type = other RNA
tcagggctgagatgccgtcg

SEQ ID NO: 916 - RNA, 20 nt, synthetic construct
  misc_feature 1..20: note = Synthetic
  source 1..20: mol_type = other RNA
cttccaatctggattcaatg

SEQ ID NO: 917 - RNA, 20 nt, synthetic construct
  misc_feature 1..20: note = Synthetic
  source 1..20: mol_type = other RNA
ggagaaggcaactggaccga

SEQ ID NO: 918 - RNA, 20 nt, synthetic construct
  misc_feature 1..20: note = Synthetic
  source 1..20: mol_type = other RNA
catctcagccctgagaaagg

SEQ ID NO: 919 - RNA, 20 nt, synthetic construct
  misc_feature 1..20: note = Synthetic
  source 1..20: mol_type = other RNA
gtacctcattgaatccagat

SEQ ID NO: 920 - RNA, 20 nt, synthetic construct
  misc_feature 1..20: note = Synthetic
  source 1..20: mol_type = other RNA
acatttgccgaagagccctc

SEQ ID NO: 921 - RNA, 20 nt, synthetic construct
  misc_feature 1..20: note = Synthetic
  source 1..20: mol_type = other RNA
acagtgtcctggacaactca

SEQ ID NO: 922 - RNA, 20 nt, synthetic construct
  misc_feature 1..20: note = Synthetic
  source 1..20: mol_type = other RNA
cacaccaagttgagggaatg

SEQ ID NO: 923 - RNA, 20 nt, synthetic construct
  misc_feature 1..20: note = Synthetic
  source 1..20: mol_type = other RNA
tcttcccccacaccaagttg

SEQ ID NO: 924 - RNA, 20 nt, synthetic construct
  misc_feature 1..20: note = Synthetic
  source 1..20: mol_type = other RNA
gtgtcctcattccctcaact

SEQ ID NO: 925 - RNA, 20 nt, synthetic construct
  misc_feature 1..20: note = Synthetic
  source 1..20: mol_type = other RNA
gacagtgtcctggacaactc

SEQ ID NO: 926 - RNA, 20 nt, synthetic construct
  misc_feature 1..20: note = Synthetic
  source 1..20: mol_type = other RNA
ggaaggcagcaggcaacacc

SEQ ID NO: 927 - RNA, 20 nt, synthetic construct
  misc_feature 1..20: note = Synthetic
  source 1..20: mol_type = other RNA
catgtgtgaaagcagcaaag

SEQ ID NO: 928 - RNA, 20 nt, synthetic construct
  misc_feature 1..20: note = Synthetic
  source 1..20: mol_type = other RNA
cttcccccacaccaagttga

SEQ ID NO: 929 - RNA, 20 nt, synthetic construct
  misc_feature 1..20: note = Synthetic
  source 1..20: mol_type = other RNA
cgtgactctgacctgcccgg

SEQ ID NO: 930 - RNA, 20 nt, synthetic construct
  misc_feature 1..20: note = Synthetic
  source 1..20: mol_type = other RNA
agctgccccaaagagtacgg

SEQ ID NO: 931 - RNA, 20 nt, synthetic construct
  misc_feature 1..20: note = Synthetic
  source 1..20: mol_type = other RNA
tcgaggtattgtcagacccc

SEQ ID NO: 932 - RNA, 20 nt, synthetic construct
  misc_feature 1..20: note = Synthetic
  source 1..20: mol_type = other RNA
gcgtgactctgacctgcccg

SEQ ID NO: 933 - RNA, 20 nt, synthetic construct
  misc_feature 1..20: note = Synthetic
  source 1..20: mol_type = other RNA
tcggtgcagctccacgactc

SEQ ID NO: 934 - RNA, 20 nt, synthetic construct
  misc_feature 1..20: note = Synthetic
  source 1..20: mol_type = other RNA
ctgccagttagcagtcccgg

SEQ ID NO: 935 - RNA, 20 nt, synthetic construct
  misc_feature 1..20: note = Synthetic
  source 1..20: mol_type = other RNA
gacactactggcgacgcaca

SEQ ID NO: 936 - RNA, 20 nt, synthetic construct
  misc_feature 1..20: note = Synthetic
  source 1..20: mol_type = other RNA
tgtgcgtcgccagtagtgtc

SEQ ID NO: 937 - RNA, 20 nt, synthetic construct
  misc_feature 1..20: note = Synthetic
  source 1..20: mol_type = other RNA
gtcatccacgacgcctggag

SEQ ID NO: 938 - RNA, 20 nt, synthetic construct
  misc_feature 1..20: note = Synthetic
  source 1..20: mol_type = other RNA
acgacgcctggagcggcctg

SEQ ID NO: 939 - RNA, 20 nt, synthetic construct
  misc_feature 1..20: note = Synthetic
  source 1..20: mol_type = other RNA
aatgcagaggagcgttccga

SEQ ID NO: 940 - RNA, 20 nt, synthetic construct
  misc_feature 1..20: note = Synthetic
  source 1..20: mol_type = other RNA
atctggtcggttgtggctcg

SEQ ID NO: 941 - RNA, 20 nt, synthetic construct
  misc_feature 1..20: note = Synthetic
  source 1..20: mol_type = other RNA
ctgatgtcataagggctccg

SEQ ID NO: 942 - RNA, 20 nt, synthetic construct
  misc_feature 1..20: note = Synthetic
  source 1..20: mol_type = other RNA
caccccatccctgacgacaa

SEQ ID NO: 943 - RNA, 20 nt, synthetic construct
  misc_feature 1..20: note = Synthetic
  source 1..20: mol_type = other RNA
tgccagttagcagtcccgga

SEQ ID NO: 944 - RNA, 20 nt, synthetic construct
  misc_feature 1..20: note = Synthetic
  source 1..20: mol_type = other RNA
tgcatccgccgtactctttg

SEQ ID NO: 945 - RNA, 20 nt, synthetic construct
  misc_feature 1..20: note = Synthetic
  source 1..20: mol_type = other RNA
agctcagatatcgggctgaa

SEQ ID NO: 946 - RNA, 20 nt, synthetic construct
  misc_feature 1..20: note = Synthetic
  source 1..20: mol_type = other RNA
acctgtccaaggcgtgccca

SEQ ID NO: 947 - RNA, 20 nt, synthetic construct
  misc_feature 1..20: note = Synthetic
  source 1..20: mol_type = other RNA
tcaggccgctccaggcgtcg

SEQ ID NO: 948 - RNA, 20 nt, synthetic construct
  misc_feature 1..20: note = Synthetic
  source 1..20: mol_type = other RNA
tgatgtcataagggctccgt

SEQ ID NO: 949 - RNA, 20 nt, synthetic construct
  misc_feature 1..20: note = Synthetic
  source 1..20: mol_type = other RNA
aactattcatgctaccgggc

SEQ ID NO: 950 - RNA, 20 nt, synthetic construct
  misc_feature 1..20: note = Synthetic
  source 1..20: mol_type = other RNA
cacgtgcctcaggccgctcc

SEQ ID NO: 951 - RNA, 20 nt, synthetic construct
  misc_feature 1..20: note = Synthetic
  source 1..20: mol_type = other RNA
agaggagcgttccgaaggcc

SEQ ID NO: 952 - RNA, 20 nt, synthetic construct
  misc_feature 1..20: note = Synthetic
  source 1..20: mol_type = other RNA
ggagccgtgccagtattccc

SEQ ID NO: 953 - RNA, 20 nt, synthetic construct
  misc_feature 1..20: note = Synthetic
  source 1..20: mol_type = other RNA
ctccgggactgctaactggc

SEQ ID NO: 954 - RNA, 20 nt, synthetic construct
  misc_feature 1..20: note = Synthetic
  source 1..20: mol_type = other RNA
tacggtttgagctcagatat

SEQ ID NO: 955 - RNA, 20 nt, synthetic construct
  misc_feature 1..20: note = Synthetic
  source 1..20: mol_type = other RNA
agccagcagcgcgcagccga

SEQ ID NO: 956 - RNA, 20 nt, synthetic construct
  misc_feature 1..20: note = Synthetic
  source 1..20: mol_type = other RNA
cagcctttgtcgtcagggat

SEQ ID NO: 957 - RNA, 20 nt, synthetic construct
  misc_feature 1..20: note = Synthetic
  source 1..20: mol_type = other RNA
ctccctccgggactgctaac

SEQ ID NO: 958 - RNA, 20 nt, synthetic construct
  misc_feature 1..20: note = Synthetic
  source 1..20: mol_type = other RNA
cggaggccatgggcacgcct

SEQ ID NO: 959 - RNA, 20 nt, synthetic construct
  misc_feature 1..20: note = Synthetic
  source 1..20: mol_type = other RNA
gtggacacctcgttctcagc

SEQ ID NO: 960 - RNA, 20 nt, synthetic construct
  misc_feature 1..20: note = Synthetic
  source 1..20: mol_type = other RNA
cctgcgcagggcagcgcctt

SEQ ID NO: 961 - RNA, 20 nt, synthetic construct
  misc_feature 1..20: note = Synthetic
  source 1..20: mol_type = other RNA
atgtgcgtcgccagtagtgt

SEQ ID NO: 962 - RNA, 20 nt, synthetic construct
  misc_feature 1..20: note = Synthetic
  source 1..20: mol_type = other RNA
ccgtggccagaaacccccgc

SEQ ID NO: 963 - RNA, 20 nt, synthetic construct
  misc_feature 1..20: note = Synthetic
  source 1..20: mol_type = other RNA
catgcatccgccgtactctt

SEQ ID NO: 964 - RNA, 20 nt, synthetic construct
  misc_feature 1..20: note = Synthetic
  source 1..20: mol_type = other RNA
ccacagactgtacggcaagg

SEQ ID NO: 965 - RNA, 20 nt, synthetic construct
  misc_feature 1..20: note = Synthetic
  source 1..20: mol_type = other RNA
tattctaccgtggtacacag

SEQ ID NO: 966 - RNA, 20 nt, synthetic construct
  misc_feature 1..20: note = Synthetic
  source 1..20: mol_type = other RNA
gaactactagtccttcactg

SEQ ID NO: 967 - RNA, 20 nt, synthetic construct
  misc_feature 1..20: note = Synthetic
  source 1..20: mol_type = other RNA
cactgtccagtattctaccg

SEQ ID NO: 968 - RNA, 20 nt, synthetic construct
  misc_feature 1..20: note = Synthetic
  source 1..20: mol_type = other RNA
tcttaaataggtgcgatgca

SEQ ID NO: 969 - RNA, 20 nt, synthetic construct
  misc_feature 1..20: note = Synthetic
  source 1..20: mol_type = other RNA
taagcaaacaggcacgacta

SEQ ID NO: 970 - RNA, 20 nt, synthetic construct
  misc_feature 1..20: note = Synthetic
  source 1..20: mol_type = other RNA
gtgcatcgcacctatttaag

SEQ ID NO: 971 - RNA, 20 nt, synthetic construct
  misc_feature 1..20: note = Synthetic
  source 1..20: mol_type = other RNA
ggtggaatggactactccaa

SEQ ID NO: 972 - RNA, 20 nt, synthetic construct
  misc_feature 1..20: note = Synthetic
  source 1..20: mol_type = other RNA
aactgtacaactcgtgtgga

SEQ ID NO: 973 - RNA, 20 nt, synthetic construct
  misc_feature 1..20: note = Synthetic
  source 1..20: mol_type = other RNA
gcggctacatgcctcagtga

SEQ ID NO: 974 - RNA, 20 nt, synthetic construct
  misc_feature 1..20: note = Synthetic
  source 1..20: mol_type = other RNA
agacttggactgacggaact

SEQ ID NO: 975 - RNA, 20 nt, synthetic construct
  misc_feature 1..20: note = Synthetic
  source 1..20: mol_type = other RNA
gactagtgacacattgtaca

SEQ ID NO: 976 - RNA, 20 nt, synthetic construct
  misc_feature 1..20: note = Synthetic
  source 1..20: mol_type = other RNA
aagcaccctgtatcacagac

SEQ ID NO: 977 - RNA, 20 nt, synthetic construct
  misc_feature 1..20: note = Synthetic
  source 1..20: mol_type = other RNA
acagaactgtacaactcgtg

SEQ ID NO: 978 - RNA, 20 nt, synthetic construct
  misc_feature 1..20: note = Synthetic
  source 1..20: mol_type = other RNA
gtttaggattcgctgtatga

SEQ ID NO: 979 - RNA, 20 nt, synthetic construct
  misc_feature 1..20: note = Synthetic
  source 1..20: mol_type = other RNA
cttccaaaggacctactgtt

SEQ ID NO: 980 - RNA, 20 nt, synthetic construct
  misc_feature 1..20: note = Synthetic
  source 1..20: mol_type = other RNA
tgtgtaccacggtagaatac

SEQ ID NO: 981 - RNA, 20 nt, synthetic construct
  misc_feature 1..20: note = Synthetic
  source 1..20: mol_type = other RNA
ggaccaaagatgcctcaact

SEQ ID NO: 982 - RNA, 20 nt, synthetic construct
  misc_feature 1..20: note = Synthetic
  source 1..20: mol_type = other RNA
caatgtgtcactagtcaaag

SEQ ID NO: 983 - RNA, 20 nt, synthetic construct
  misc_feature 1..20: note = Synthetic
  source 1..20: mol_type = other RNA
gccaggtatacctcttaaat

SEQ ID NO: 984 - RNA, 20 nt, synthetic construct
  misc_feature 1..20: note = Synthetic
  source 1..20: mol_type = other RNA
cctggtccatcagcatatac

SEQ ID NO: 985 - RNA, 20 nt, synthetic construct
  misc_feature 1..20: note = Synthetic
  source 1..20: mol_type = other RNA
actcggatcttgagaagact

SEQ ID NO: 986 - RNA, 20 nt, synthetic construct
  misc_feature 1..20: note = Synthetic
  source 1..20: mol_type = other RNA
tgtccgaacagtaggtcctt

SEQ ID NO: 987 - RNA, 20 nt, synthetic construct
  misc_feature 1..20: note = Synthetic
  source 1..20: mol_type = other RNA
tggacttacgagcttgttta

SEQ ID NO: 988 - RNA, 20 nt, synthetic construct
  misc_feature 1..20: note = Synthetic
  source 1..20: mol_type = other RNA
atggaggctgcgactgatga

SEQ ID NO: 989 - RNA, 20 nt, synthetic construct
  misc_feature 1..20: note = Synthetic
  source 1..20: mol_type = other RNA
cacattgtacatggtacgaa

SEQ ID NO: 990 - RNA, 20 nt, synthetic construct
  misc_feature 1..20: note = Synthetic
  source 1..20: mol_type = other RNA
cacccaaagcatgttatctt

SEQ ID NO: 991 - RNA, 20 nt, synthetic construct
  misc_feature 1..20: note = Synthetic
  source 1..20: mol_type = other RNA
ttgcctggtcctcctgactg

SEQ ID NO: 992 - RNA, 20 nt, synthetic construct
  misc_feature 1..20: note = Synthetic
  source 1..20: mol_type = other RNA
aggcgcatgtgaactccctg

SEQ ID NO: 993 - RNA, 20 nt, synthetic construct
  misc_feature 1..20: note = Synthetic
  source 1..20: mol_type = other RNA
cggagatctcgaagcatgtt

SEQ ID NO: 994 - RNA, 20 nt, synthetic construct
  misc_feature 1..20: note = Synthetic
  source 1..20: mol_type = other RNA
gaagatgtcaaactcactca

SEQ ID NO: 995 - RNA, 20 nt, synthetic construct
  misc_feature 1..20: note = Synthetic
  source 1..20: mol_type = other RNA
ggcgcatgtgaactccctgg

SEQ ID NO: 996 - RNA, 20 nt, synthetic construct
  misc_feature 1..20: note = Synthetic
  source 1..20: mol_type = other RNA
aaggcgcatgtgaactccct

SEQ ID NO: 997 - RNA, 20 nt, synthetic construct
  misc_feature 1..20: note = Synthetic
  source 1..20: mol_type = other RNA
caaggcgcatgtgaactccc

SEQ ID NO: 998 - RNA, 20 nt, synthetic construct
  misc_feature 1..20: note = Synthetic
  source 1..20: mol_type = other RNA
gcgccgtagcctcagcctga

SEQ ID NO: 999 - RNA, 20 nt, synthetic construct
  misc_feature 1..20: note = Synthetic
  source 1..20: mol_type = other RNA
ggtcttcaggttctccccca

SEQ ID NO: 1000 - RNA, 20 nt, synthetic construct
  misc_feature 1..20: note = Synthetic
  source 1..20: mol_type = other RNA
gggtcttggttctcagcttg

SEQ ID NO: 1001 - RNA, 20 nt, synthetic construct
  misc_feature 1..20: note = Synthetic
  source 1..20: mol_type = other RNA
gatgatccagttttacctgg

SEQ ID NO: 1002 - RNA, 20 nt, synthetic construct
  misc_feature 1..20: note = Synthetic
  source 1..20: mol_type = other RNA
aaactggatcatctcagaca

SEQ ID NO: 1003 - RNA, 20 nt, synthetic construct
  misc_feature 1..20: note = Synthetic
  source 1..20: mol_type = other RNA
ggatcatctcagacaaggct

SEQ ID NO: 1004 - RNA, 20 nt, synthetic construct
  misc_feature 1..20: note = Synthetic
  source 1..20: mol_type = other RNA
tcgtatcttcattgtcatgt

SEQ ID NO: 1005 - RNA, 20 nt, synthetic construct
  misc_feature 1..20: note = Synthetic
  source 1..20: mol_type = other RNA
tggccctcaccccagtcagg

SEQ ID NO: 1006 - RNA, 20 nt, synthetic construct
  misc_feature 1..20: note = Synthetic
  source 1..20: mol_type = other RNA
gaaccaagacccagacatca

SEQ ID NO: 1007 - RNA, 20 nt, synthetic construct
  misc_feature 1..20: note = Synthetic
  source 1..20: mol_type = other RNA
tcacatgcgccttgatgtct

SEQ ID NO: 1008 - RNA, 20 nt, synthetic construct
  misc_feature 1..20: note = Synthetic
  source 1..20: mol_type = other RNA
gcgccgccagcagcactacg

SEQ ID NO: 1009 - RNA, 20 nt, synthetic construct
  misc_feature 1..20: note = Synthetic
  source 1..20: mol_type = other RNA
tggcattccagggttacctg

SEQ ID NO: 1010 - RNA, 20 nt, synthetic construct
  misc_feature 1..20: note = Synthetic
  source 1..20: mol_type = other RNA
tcgcttcccgaagtaacaag

SEQ ID NO: 1011 - RNA, 20 nt, synthetic construct
  misc_feature 1..20: note = Synthetic
  source 1..20: mol_type = other RNA
gcgccgcacatacagctgga

SEQ ID NO: 1012 - RNA, 20 nt, synthetic construct
  misc_feature 1..20: note = Synthetic
  source 1..20: mol_type = other RNA
tgggtagctgaatcttcccg

SEQ ID NO: 1013 - RNA, 20 nt, synthetic construct
  misc_feature 1..20: note = Synthetic
  source 1..20: mol_type = other RNA
ctggttccactgtcccgttg

SEQ ID NO: 1014 - RNA, 20 nt, synthetic construct
  misc_feature 1..20: note = Synthetic
  source 1..20: mol_type = other RNA
gctggttccactgtcccgtt

SEQ ID NO: 1015 - RNA, 20 nt, synthetic construct
  misc_feature 1..20: note = Synthetic
  source 1..20: mol_type = other RNA
cgtcttggctcagacgctca

SEQ ID NO: 1016 - RNA, 20 nt, synthetic construct
  misc_feature 1..20: note = Synthetic
  source 1..20: mol_type = other RNA
tgcggtaaggtcataggaca

SEQ ID NO: 1017 - RNA, 20 nt, synthetic construct
  misc_feature 1..20: note = Synthetic
  source 1..20: mol_type = other RNA
gtttcccggcaccttgcgaa

SEQ ID NO: 1018 - RNA, 20 nt, synthetic construct
  misc_feature 1..20: note = Synthetic
  source 1..20: mol_type = other RNA
aggcctcctcatcaagcggg

SEQ ID NO: 1019 - RNA, 20 nt, synthetic construct
  misc_feature 1..20: note = Synthetic
  source 1..20: mol_type = other RNA
gcaagcctgcctcatcaacc

SEQ ID NO: 1020 - RNA, 20 nt, synthetic construct
  misc_feature 1..20: note = Synthetic
  source 1..20: mol_type = other RNA
cttcaaaccacacagacgga

SEQ ID NO: 1021 - RNA, 20 nt, synthetic construct
  misc_feature 1..20: note = Synthetic
  source 1..20: mol_type = other RNA
ctgcggtaaggtcataggac

SEQ ID NO: 1022 - RNA, 20 nt, synthetic construct
  misc_feature 1..20: note = Synthetic
  source 1..20: mol_type = other RNA
gtatgagattgccattcgca

SEQ ID NO: 1023 - RNA, 20 nt, synthetic construct
  misc_feature 1..20: note = Synthetic
  source 1..20: mol_type = other RNA
gattgccattcgcaaggtgc

SEQ ID NO: 1024 - RNA, 20 nt, synthetic construct
  misc_feature 1..20: note = Synthetic
  source 1..20: mol_type = other RNA
ttacttcgggaagcgacaga

SEQ ID NO: 1025 - RNA, 20 nt, synthetic construct
  misc_feature 1..20: note = Synthetic
  source 1..20: mol_type = other RNA
ctcctcatcaagcgggtgga

SEQ ID NO: 1026 - RNA, 20 nt, synthetic construct
  misc_feature 1..20: note = Synthetic
  source 1..20: mol_type = other RNA
tacgaggcacggcagcatcc

SEQ ID NO: 1027 - RNA, 20 nt, synthetic construct
  misc_feature 1..20: note = Synthetic
  source 1..20: mol_type = other RNA
gccagcagcactacgaggca

SEQ ID NO: 1028 - RNA, 20 nt, synthetic construct
  misc_feature 1..20: note = Synthetic
  source 1..20: mol_type = other RNA
gtcgcttcccgaagtaacaa

SEQ ID NO: 1029 - RNA, 20 nt, synthetic construct
  misc_feature 1..20: note = Synthetic
  source 1..20: mol_type = other RNA
gctatgaagtggcgctcctg

SEQ ID NO: 1030 - RNA, 20 nt, synthetic construct
  misc_feature 1..20: note = Synthetic
  source 1..20: mol_type = other RNA
ggtcactgcggtaaggtcat

SEQ ID NO: 1031 - RNA, 20 nt, synthetic construct
  misc_feature 1..20: note = Synthetic
  source 1..20: mol_type = other RNA
ggtccaaggtcactgcggta

SEQ ID NO: 1032 - RNA, 20 nt, synthetic construct
  misc_feature 1..20: note = Synthetic
  source 1..20: mol_type = other RNA
tcgggaagattcagctaccc

SEQ ID NO: 1033 - RNA, 20 nt, synthetic construct
  misc_feature 1..20: note = Synthetic
  source 1..20: mol_type = other RNA
tgtcgcttcccgaagtaaca

SEQ ID NO: 1034 - RNA, 20 nt, synthetic construct
  misc_feature 1..20: note = Synthetic
  source 1..20: mol_type = other RNA
acacagggtggctcggcctt

SEQ ID NO: 1035 - RNA, 20 nt, synthetic construct
  misc_feature 1..20: note = Synthetic
  source 1..20: mol_type = other RNA
gaagaatcgcccttgacaga

SEQ ID NO: 1036 - RNA, 20 nt, synthetic construct
  misc_feature 1..20: note = Synthetic
  source 1..20: mol_type = other RNA
ccaggcatctcccgaatttg

SEQ ID NO: 1037 - RNA, 20 nt, synthetic construct
  misc_feature 1..20: note = Synthetic
  source 1..20: mol_type = other RNA
cgagtcactcacttgactgc

SEQ ID NO: 1038 - RNA, 20 nt, synthetic construct
  misc_feature 1..20: note = Synthetic
  source 1..20: mol_type = other RNA
caggagcgccacttcatagc

SEQ ID NO: 1039 - RNA, 20 nt, synthetic construct
  misc_feature 1..20: note = Synthetic
  source 1..20: mol_type = other RNA
acctggtatctcctcaggta

SEQ ID NO: 1040 - RNA, 20 nt, synthetic construct
  misc_feature 1..20: note = Synthetic
  source 1..20: mol_type = other RNA
attgccattcgcaaggtgcc

SEQ ID NO: 1041 - RNA, 20 nt, synthetic construct
  misc_feature 1..20: note = Synthetic
  source 1..20: mol_type = other RNA
aagcgacagatggtttcacc

SEQ ID NO: 1042 - RNA, 20 nt, synthetic construct
  misc_feature 1..20: note = Synthetic
  source 1..20: mol_type = other RNA
cggagccctcgcctactgcc

SEQ ID NO: 1043 - RNA, 20 nt, synthetic construct
  misc_feature 1..20: note = Synthetic
  source 1..20: mol_type = other RNA
caccatccacccgcttgatg

SEQ ID NO: 1044 - RNA, 20 nt, synthetic construct
  misc_feature 1..20: note = Synthetic
  source 1..20: mol_type = other RNA
ggctggttccactgtcccgt

SEQ ID NO: 1045 - RNA, 20 nt, synthetic construct
  misc_feature 1..20: note = Synthetic
  source 1..20: mol_type = other RNA
aggagtgaccattcctcagt

SEQ ID NO: 1046 - RNA, 20 nt, synthetic construct
  misc_feature 1..20: note = Synthetic
  source 1..20: mol_type = other RNA
agctccagtcagatattccc

SEQ ID NO: 1047 - RNA, 20 nt, synthetic construct
  misc_feature 1..20: note = Synthetic
  source 1..20: mol_type = other RNA
ttggacctgtaccacagcaa

SEQ ID NO: 1048 - RNA, 20 nt, synthetic construct
  misc_feature 1..20: note = Synthetic
  source 1..20: mol_type = other RNA
tcatttgcgggggccatctt

SEQ ID NO: 1049 - RNA, 20 nt, synthetic construct
  misc_feature 1..20: note = Synthetic
  source 1..20: mol_type = other RNA
caaggtgccgggaaacttca

SEQ ID NO: 1050 - RNA, 20 nt, synthetic construct
  misc_feature 1..20: note = Synthetic
  source 1..20: mol_type = other RNA
ggcgccgcacatacagctgg

SEQ ID NO: 1051 - RNA, 20 nt, synthetic construct
  misc_feature 1..20: note = Synthetic
  source 1..20: mol_type = other RNA
catccacccgcttgatgagg

SEQ ID NO: 1052 - RNA, 20 nt, synthetic construct
  misc_feature 1..20: note = Synthetic
  source 1..20: mol_type = other RNA
tggcccggtagccattgctg

SEQ ID NO: 1053 - RNA, 20 nt, synthetic construct
  misc_feature 1..20: note = Synthetic
  source 1..20: mol_type = other RNA
tgtaccacagcaatggctac

SEQ ID NO: 1054 - RNA, 20 nt, synthetic construct
  misc_feature 1..20: note = Synthetic
  source 1..20: mol_type = other RNA
cccccaggctgacagaacgc

SEQ ID NO: 1055 - RNA, 20 nt, synthetic construct
  misc_feature 1..20: note = Synthetic
  source 1..20: mol_type = other RNA
accaggcatctcccgaattt

SEQ ID NO: 1056 - RNA, 20 nt, synthetic construct
  misc_feature 1..20: note = Synthetic
  source 1..20: mol_type = other RNA
tcacagctcagtacctaagg

SEQ ID NO: 1057 - RNA, 20 nt, synthetic construct
  misc_feature 1..20: note = Synthetic
  source 1..20: mol_type = other RNA
tgagaaatcacattccgtca

SEQ ID NO: 1058 - RNA, 20 nt, synthetic construct
  misc_feature 1..20: note = Synthetic
  source 1..20: mol_type = other RNA
tgtgagcaaacaacccatga

SEQ ID NO: 1059 - RNA, 20 nt, synthetic construct
  misc_feature 1..20: note = Synthetic
  source 1..20: mol_type = other RNA
atctcagggcttaccgtcat

SEQ ID NO: 1060 - RNA, 20 nt, synthetic construct
  misc_feature 1..20: note = Synthetic
  source 1..20: mol_type = other RNA
cacagctcagtacctaaggt

SEQ ID NO: 1061 - RNA, 20 nt, synthetic construct
  misc_feature 1..20: note = Synthetic
  source 1..20: mol_type = other RNA
cttgtaaacgcaccacagca

SEQ ID NO: 1062 - RNA, 20 nt, synthetic construct
  misc_feature 1..20: note = Synthetic
  source 1..20: mol_type = other RNA
cccagcgtccgtccatggcg

SEQ ID NO: 1063 - RNA, 20 nt, synthetic construct
  misc_feature 1..20: note = Synthetic
  source 1..20: mol_type = other RNA
ttgagaatgaatacgaaact

SEQ ID NO: 1064 - RNA, 20 nt, synthetic construct
  misc_feature 1..20: note = Synthetic
  source 1..20: mol_type = other RNA
gatgacggccaccatccagg

SEQ ID NO: 1065 - RNA, 20 nt, synthetic construct
  misc_feature 1..20: note = Synthetic
  source 1..20: mol_type = other RNA
tcggctgcttcgccttgctg

SEQ ID NO: 1066 - RNA, 20 nt, synthetic construct
  misc_feature 1..20: note = Synthetic
  source 1..20: mol_type = other RNA
aataagttgtccatggctcc

SEQ ID NO: 1067 - RNA, 20 nt, synthetic construct
  misc_feature 1..20: note = Synthetic
  source 1..20: mol_type = other RNA
catctcagggcttaccgtca

SEQ ID NO: 1068 - RNA, 20 nt, synthetic construct
  misc_feature 1..20: note = Synthetic
  source 1..20: mol_type = other RNA
attctcatccgacaatggaa

SEQ ID NO: 1069 - RNA, 20 nt, synthetic construct
  misc_feature 1..20: note = Synthetic
  source 1..20: mol_type = other RNA
ctttcacagctcagtaccta

SEQ ID NO: 1070 - RNA, 20 nt, synthetic construct
  misc_feature 1..20: note = Synthetic
  source 1..20: mol_type = other RNA
caaggtgtggtcaccatact

SEQ ID NO: 1071 - RNA, 20 nt, synthetic construct
  misc_feature 1..20: note = Synthetic
  source 1..20: mol_type = other RNA
ttagccattattggaccccc

SEQ ID NO: 1072 - RNA, 20 nt, synthetic construct
  misc_feature 1..20: note = Synthetic
  source 1..20: mol_type = other RNA
cttattgtgttcaagttcga

SEQ ID NO: 1073 - RNA, 20 nt, synthetic construct
  misc_feature 1..20: note = Synthetic
  source 1..20: mol_type = other RNA
tccccagctttgttccgatc

SEQ ID NO: 1074 - RNA, 20 nt, synthetic construct
  misc_feature 1..20: note = Synthetic
  source 1..20: mol_type = other RNA
ttcctgatcggaacaaagct

SEQ ID NO: 1075 - RNA, 20 nt, synthetic construct
  misc_feature 1..20: note = Synthetic
  source 1..20: mol_type = other RNA
cgtccatggcgtggagcctt

SEQ ID NO: 1076 - RNA, 20 nt, synthetic construct
  misc_feature 1..20: note = Synthetic
  source 1..20: mol_type = other RNA
ggacttataatgtgcaatac

SEQ ID NO: 1077 - RNA, 20 nt, synthetic construct
  misc_feature 1..20: note = Synthetic
  source 1..20: mol_type = other RNA
acttattgtgttcaagttcg

SEQ ID NO: 1078 - RNA, 20 nt, synthetic construct
  misc_feature 1..20: note = Synthetic
  source 1..20: mol_type = other RNA
cattccagggggtccaataa

SEQ ID NO: 1079 - RNA, 20 nt, synthetic construct
  misc_feature 1..20: note = Synthetic
  source 1..20: mol_type = other RNA
gtgaccacaccttgagagtc

SEQ ID NO: 1080 - RNA, 20 nt, synthetic construct
  misc_feature 1..20: note = Synthetic
  source 1..20: mol_type = other RNA
ccgtccatggcgtggagcct

SEQ ID NO: 1081 - RNA, 20 nt, synthetic construct
  misc_feature 1..20: note = Synthetic
  source 1..20: mol_type = other RNA
cttcctgatcggaacaaagc

SEQ ID NO: 1082 - RNA, 20 nt, synthetic construct
  misc_feature 1..20: note = Synthetic
  source 1..20: mol_type = other RNA
agtacttctacttgcattcc

SEQ ID NO: 1083 - RNA, 20 nt, synthetic construct
  misc_feature 1..20: note = Synthetic
  source 1..20: mol_type = other RNA
tgtccgagacaccaaaatcg

SEQ ID NO: 1084 - RNA, 20 nt, synthetic construct
  misc_feature 1..20: note = Synthetic
  source 1..20: mol_type = other RNA
gcagcctgacacgttgatca

SEQ ID NO: 1085 - RNA, 20 nt, synthetic construct
  misc_feature 1..20: note = Synthetic
  source 1..20: mol_type = other RNA
gagcggattctgcccgcaca

SEQ ID NO: 1086 - RNA, 20 nt, synthetic construct
  misc_feature 1..20: note = Synthetic
  source 1..20: mol_type = other RNA
gcaagtgagagcaatgaccg

SEQ ID NO: 1087 - RNA, 20 nt, synthetic construct
  misc_feature 1..20: note = Synthetic
  source 1..20: mol_type = other RNA
gaatccctgatcaacgtgtc

SEQ ID NO: 1088 - RNA, 20 nt, synthetic construct
  misc_feature 1..20: note = Synthetic
  source 1..20: mol_type = other RNA
ggtgtctcggacatgcaagc

SEQ ID NO: 1089 - RNA, 20 nt, synthetic construct
  misc_feature 1..20: note = Synthetic
  source 1..20: mol_type = other RNA
tggtcaacaaaagcgccatg

SEQ ID NO: 1090 - RNA, 20 nt, synthetic construct
  misc_feature 1..20: note = Synthetic
  source 1..20: mol_type = other RNA
catggcgcttttgttgacca

SEQ ID NO: 1091 - RNA, 20 nt, synthetic construct
  misc_feature 1..20: note = Synthetic
  source 1..20: mol_type = other RNA
gcccgcacaaggtctcagct

SEQ ID NO: 1092 - RNA, 20 nt, synthetic construct
  misc_feature 1..20: note = Synthetic
  source 1..20: mol_type = other RNA
ccgagacaccaaaatcgagg

SEQ ID NO: 1093 - RNA, 20 nt, synthetic construct
  misc_feature 1..20: note = Synthetic
  source 1..20: mol_type = other RNA
gagcaggtcctttacaaact

SEQ ID NO: 1094 - RNA, 20 nt, synthetic construct
  misc_feature 1..20: note = Synthetic
  source 1..20: mol_type = other RNA
tggagcatcaacctgacagc

SEQ ID NO: 1095 - RNA, 20 nt, synthetic construct
  misc_feature 1..20: note = Synthetic
  source 1..20: mol_type = other RNA
aaactgggccacctcgattt

SEQ ID NO: 1096 - RNA, 20 nt, synthetic construct
  misc_feature 1..20: note = Synthetic
  source 1..20: mol_type = other RNA
cacgttgatcagggattcca

SEQ ID NO: 1097 - RNA, 20 nt, synthetic construct
  misc_feature 1..20: note = Synthetic
  source 1..20: mol_type = other RNA
tgcccgcacaaggtctcagc

SEQ ID NO: 1098 - RNA, 20 nt, synthetic construct
  misc_feature 1..20: note = Synthetic
  source 1..20: mol_type = other RNA
tgcagcctgacacgttgatc

SEQ ID NO: 1099 - RNA, 20 nt, synthetic construct
  misc_feature 1..20: note = Synthetic
  source 1..20: mol_type = other RNA
ttaaagaaactttttcgcga

SEQ ID NO: 1100 - RNA, 20 nt, synthetic construct
  misc_feature 1..20: note = Synthetic
  source 1..20: mol_type = other RNA
gctagccgacactcaccttc

SEQ ID NO: 1101 - RNA, 20 nt, synthetic construct
  misc_feature 1..20: note = Synthetic
  source 1..20: mol_type = other RNA
cgaggtggcccagtttgtaa

SEQ ID NO: 1102 - RNA, 20 nt, synthetic construct
  misc_feature 1..20: note = Synthetic
  source 1..20: mol_type = other RNA
tttaaagaaactttttcgcg

SEQ ID NO: 1103 - RNA, 20 nt, synthetic construct
  misc_feature 1..20: note = Synthetic
  source 1..20: mol_type = other RNA
gaatccgctcagcatcctct

SEQ ID NO: 1104 - RNA, 20 nt, synthetic construct
  misc_feature 1..20: note = Synthetic
  source 1..20: mol_type = other RNA
ccacctcgattttggtgtct

SEQ ID NO: 1105 - RNA, 20 nt, synthetic construct
  misc_feature 1..20: note = Synthetic
  source 1..20: mol_type = other RNA
tggacatggaatccacccga

SEQ ID NO: 1106 - RNA, 20 nt, synthetic construct
  misc_feature 1..20: note = Synthetic
  source 1..20: mol_type = other RNA
taacatggttatgtagagtg

SEQ ID NO: 1107 - RNA, 20 nt, synthetic construct
  misc_feature 1..20: note = Synthetic
  source 1..20: mol_type = other RNA
atggacatggaatccacccg

SEQ ID NO: 1108 - RNA, 20 nt, synthetic construct
  misc_feature 1..20: note = Synthetic
  source 1..20: mol_type = other RNA
atagtgcctttaacttcccg

SEQ ID NO: 1109 - RNA, 20 nt, synthetic construct
  misc_feature 1..20: note = Synthetic
  source 1..20: mol_type = other RNA
cgagggtcgcactcacccgt

SEQ ID NO: 1110 - RNA, 20 nt, synthetic construct
  misc_feature 1..20: note = Synthetic
  source 1..20: mol_type = other RNA
tagaagtacccctgaatgag

SEQ ID NO: 1111 - RNA, 20 nt, synthetic construct
  misc_feature 1..20: note = Synthetic
  source 1..20: mol_type = other RNA
gtcgcactcacccgtaggcg

SEQ ID NO: 1112 - RNA, 20 nt, synthetic construct
  misc_feature 1..20: note = Synthetic
  source 1..20: mol_type = other RNA
cgggactggtattccttcca

SEQ ID NO: 1113 - RNA, 20 nt, synthetic construct
  misc_feature 1..20: note = Synthetic
  source 1..20: mol_type = other RNA
agtatagttagtgtcgggac

SEQ ID NO: 1114 - RNA, 20 nt, synthetic construct
  misc_feature 1..20: note = Synthetic
  source 1..20: mol_type = other RNA
tttgagctggctccctcggg

SEQ ID NO: 1115 - RNA, 20 nt, synthetic construct
  misc_feature 1..20: note = Synthetic
  source 1..20: mol_type = other RNA
caatttgagctggctccctc

SEQ ID NO: 1116 - RNA, 20 nt, synthetic construct
  misc_feature 1..20: note = Synthetic
  source 1..20: mol_type = other RNA
ccagctcaaattgtagtcta

SEQ ID NO: 1117 - RNA, 20 nt, synthetic construct
  misc_feature 1..20: note = Synthetic
  source 1..20: mol_type = other RNA
tcgggactggtattccttcc

SEQ ID NO: 1118 - RNA, 20 nt, synthetic construct
  misc_feature 1..20: note = Synthetic
  source 1..20: mol_type = other RNA
attgttccagtcatcgtcgc

SEQ ID NO: 1119 - RNA, 20 nt, synthetic construct
  misc_feature 1..20: note = Synthetic
  source 1..20: mol_type = other RNA
ggacttctaaaacttaccac

SEQ ID NO: 1120 - RNA, 20 nt, synthetic construct
  misc_feature 1..20: note = Synthetic
  source 1..20: mol_type = other RNA
gtggaattgcgcttcttacc

SEQ ID NO: 1121 - RNA, 20 nt, synthetic construct
  misc_feature 1..20: note = Synthetic
  source 1..20: mol_type = other RNA
gagacactcaaatttgtcac

SEQ ID NO: 1122 - RNA, 20 nt, synthetic construct
  misc_feature 1..20: note = Synthetic
  source 1..20: mol_type = other RNA
attgcacctgcgacgatgac

SEQ ID NO: 1123 - RNA, 20 nt, synthetic construct
  misc_feature 1..20: note = Synthetic
  source 1..20: mol_type = other RNA
cactctcattggtgctacac

SEQ ID NO: 1124 - RNA, 20 nt, synthetic construct
  misc_feature 1..20: note = Synthetic
  source 1..20: mol_type = other RNA
ccatagactacaatttgagc

SEQ ID NO: 1125 - RNA, 20 nt, synthetic construct
  misc_feature 1..20: note = Synthetic
  source 1..20: mol_type = other RNA
tgatgacctatatgtgcaat

SEQ ID NO: 1126 - RNA, 20 nt, synthetic construct
  misc_feature 1..20: note = Synthetic
  source 1..20: mol_type = other RNA
cacataatgttttctacgta

SEQ ID NO: 1127 - RNA, 20 nt, synthetic construct
  misc_feature 1..20: note = Synthetic
  source 1..20: mol_type = other RNA
ctgactgtgttcaaagtatc

SEQ ID NO: 1128 - RNA, 20 nt, synthetic construct
  misc_feature 1..20: note = Synthetic
  source 1..20: mol_type = other RNA
ggcgggggcgccgcgcctac

SEQ ID NO: 1129 - RNA, 20 nt, synthetic construct
  misc_feature 1..20: note = Synthetic
  source 1..20: mol_type = other RNA
aacttaccacgggaagttaa

SEQ ID NO: 1130 - RNA, 20 nt, synthetic construct
  misc_feature 1..20: note = Synthetic
  source 1..20: mol_type = other RNA
tctattgaacgacgagtttc

SEQ ID NO: 1131 - RNA, 20 nt, synthetic construct
  misc_feature 1..20: note = Synthetic
  source 1..20: mol_type = other RNA
tcttcgataggtcttcacct

SEQ ID NO: 1132 - RNA, 20 nt, synthetic construct
  misc_feature 1..20: note = Synthetic
  source 1..20: mol_type = other RNA
gctgaaatggagcatacctt

SEQ ID NO: 1133 - RNA, 20 nt, synthetic construct
  misc_feature 1..20: note = Synthetic
  source 1..20: mol_type = other RNA
tcaagaagtacacctatgcc

SEQ ID NO: 1134 - RNA, 20 nt, synthetic construct
  misc_feature 1..20: note = Synthetic
  source 1..20: mol_type = other RNA
gaactaaaataccgaaacat

SEQ ID NO: 1135 - RNA, 20 nt, synthetic construct
  misc_feature 1..20: note = Synthetic
  source 1..20: mol_type = other RNA
attgctcagatgacggaatt

SEQ ID NO: 1136 - RNA, 20 nt, synthetic construct
  misc_feature 1..20: note = Synthetic
  source 1..20: mol_type = other RNA
cttgctggaataggtcccaa

SEQ ID NO: 1137 - RNA, 20 nt, synthetic construct
  misc_feature 1..20: note = Synthetic
  source 1..20: mol_type = other RNA
cgagtaaaagtaagatagac

SEQ ID NO: 1138 - RNA, 20 nt, synthetic construct
  misc_feature 1..20: note = Synthetic
  source 1..20: mol_type = other RNA
cctgggcagaaactacttat

SEQ ID NO: 1139 - RNA, 20 nt, synthetic construct
  misc_feature 1..20: note = Synthetic
  source 1..20: mol_type = other RNA
atagtggatcccggatactt

SEQ ID NO: 1140 - RNA, 20 nt, synthetic construct
  misc_feature 1..20: note = Synthetic
  source 1..20: mol_type = other RNA
aggatgcagatttccctatt

SEQ ID NO: 1141 - RNA, 20 nt, synthetic construct
  misc_feature 1..20: note = Synthetic
  source 1..20: mol_type = other RNA
tagagataacctaagtatcc

SEQ ID NO: 1142 - RNA, 20 nt, synthetic construct
  misc_feature 1..20: note = Synthetic
  source 1..20: mol_type = other RNA
tcttcagacaccgagataaa

SEQ ID NO: 1143 - RNA, 20 nt, synthetic construct
  misc_feature 1..20: note = Synthetic
  source 1..20: mol_type = other RNA
ctacgtttctggctaccatt

SEQ ID NO: 1144 - RNA, 20 nt, synthetic construct
  misc_feature 1..20: note = Synthetic
  source 1..20: mol_type = other RNA
gtagcaaagttttcttcgat

SEQ ID NO: 1145 - RNA, 20 nt, synthetic construct
  misc_feature 1..20: note = Synthetic
  source 1..20: mol_type = other RNA
gtaagatagactggcggcaa

SEQ ID NO: 1146 - RNA, 20 nt, synthetic construct
  misc_feature 1..20: note = Synthetic
  source 1..20: mol_type = other RNA
gctttcgtttgcttggctat

SEQ ID NO: 1147 - RNA, 20 nt, synthetic construct
  misc_feature 1..20: note = Synthetic
  source 1..20: mol_type = other RNA
agaaaactttgctacgtttc

SEQ ID NO: 1148 - RNA, 20 nt, synthetic construct
  misc_feature 1..20: note = Synthetic
  source 1..20: mol_type = other RNA
tgcaggactcaccaccaatg

SEQ ID NO: 1149 - RNA, 20 nt, synthetic construct
  misc_feature 1..20: note = Synthetic
  source 1..20: mol_type = other RNA
ggttgaccatcacagtccgg

SEQ ID NO: 1150 - RNA, 20 nt, synthetic construct
  misc_feature 1..20: note = Synthetic
  source 1..20: mol_type = other RNA
aggttgaccatcacagtccg

SEQ ID NO: 1151 - RNA, 20 nt, synthetic construct
  misc_feature 1..20: note = Synthetic
  source 1..20: mol_type = other RNA
ggatcggttgtagtaatctg

SEQ ID NO: 1152 - RNA, 20 nt, synthetic construct
  misc_feature 1..20: note = Synthetic
  source 1..20: mol_type = other RNA
tcccctctgcagccgcaatg

SEQ ID NO: 1153 - RNA, 20 nt, synthetic construct
  misc_feature 1..20: note = Synthetic
  source 1..20: mol_type = other RNA
agagatcctggtcctgcgca

SEQ ID NO: 1154 - RNA, 20 nt, synthetic construct
  misc_feature 1..20: note = Synthetic
  source 1..20: mol_type = other RNA
ggccacatggtggacaatcg

SEQ ID NO: 1155 - RNA, 20 nt, synthetic construct
  misc_feature 1..20: note = Synthetic
  source 1..20: mol_type = other RNA
gaacttcccccggactgtga

SEQ ID NO: 1156 - RNA, 20 nt, synthetic construct
  misc_feature 1..20: note = Synthetic
  source 1..20: mol_type = other RNA
gagaagatactggtgtccgt

SEQ ID NO: 1157 - RNA, 20 nt, synthetic construct
  misc_feature 1..20: note = Synthetic
  source 1..20: mol_type = other RNA
acaaccgatccacctcacct

SEQ ID NO: 1158 - RNA, 20 nt, synthetic construct
  misc_feature 1..20: note = Synthetic
  source 1..20: mol_type = other RNA
tgggctgcatcaacgctgat

SEQ ID NO: 1159 - RNA, 20 nt, synthetic construct
  misc_feature 1..20: note = Synthetic
  source 1..20: mol_type = other RNA
catcaacgctgatgggaacg

SEQ ID NO: 1160 - RNA, 20 nt, synthetic construct
  misc_feature 1..20: note = Synthetic
  source 1..20: mol_type = other RNA
caccccgattgtccaccatg

SEQ ID NO: 1161 - RNA, 20 nt, synthetic construct
  misc_feature 1..20: note = Synthetic
  source 1..20: mol_type = other RNA
ttgggctgcatcaacgctga

SEQ ID NO: 1162 - RNA, 20 nt, synthetic construct
  misc_feature 1..20: note = Synthetic
  source 1..20: mol_type = other RNA
aagagatcctggtcctgcgc

SEQ ID NO: 1163 - RNA, 20 nt, synthetic construct
  misc_feature 1..20: note = Synthetic
  source 1..20: mol_type = other RNA
cagtatcttctccagccgga

SEQ ID NO: 1164 - RNA, 20 nt, synthetic construct
  misc_feature 1..20: note = Synthetic
  source 1..20: mol_type = other RNA
gtggacaatcggggtgacac

SEQ ID NO: 1165 - RNA, 20 nt, synthetic construct
  misc_feature 1..20: note = Synthetic
  source 1..20: mol_type = other RNA
gaggcaaagtgccgccactt

SEQ ID NO: 1166 - RNA, 20 nt, synthetic construct
  misc_feature 1..20: note = Synthetic
  source 1..20: mol_type = other RNA
taggccacatggtggacaat

SEQ ID NO: 1167 - RNA, 20 nt, synthetic construct
  misc_feature 1..20: note = Synthetic
  source 1..20: mol_type = other RNA
cagcgttgatgcagcccaag

SEQ ID NO: 1168 - RNA, 20 nt, synthetic construct
  misc_feature 1..20: note = Synthetic
  source 1..20: mol_type = other RNA
atcacaatcccacgaaatcc

SEQ ID NO: 1169 - RNA, 20 nt, synthetic construct
  misc_feature 1..20: note = Synthetic
  source 1..20: mol_type = other RNA
cttccggctggagaagatac

SEQ ID NO: 1170 - RNA, 20 nt, synthetic construct
  misc_feature 1..20: note = Synthetic
  source 1..20: mol_type = other RNA
ttgggcatcctggatttcgt

SEQ ID NO: 1171 - RNA, 20 nt, synthetic construct
  misc_feature 1..20: note = Synthetic
  source 1..20: mol_type = other RNA
gtagtaatctgaggaccttt

SEQ ID NO: 1172 - RNA, 20 nt, synthetic construct
  misc_feature 1..20: note = Synthetic
  source 1..20: mol_type = other RNA
ggaggcaaagtgccgccact

SEQ ID NO: 1173 - RNA, 20 nt, synthetic construct
  misc_feature 1..20: note = Synthetic
  source 1..20: mol_type = other RNA
tggtattggtattccggtta

SEQ ID NO: 1174 - RNA, 20 nt, synthetic construct
  misc_feature 1..20: note = Synthetic
  source 1..20: mol_type = other RNA
gtgtgacgttggatcgctgg

SEQ ID NO: 1175 - RNA, 20 nt, synthetic construct
  misc_feature 1..20: note = Synthetic
  source 1..20: mol_type = other RNA
ttcacgatgccggttcccgg

SEQ ID NO: 1176 - RNA, 20 nt, synthetic construct
  misc_feature 1..20: note = Synthetic
  source 1..20: mol_type = other RNA
catttccgtgagtccctcgg

SEQ ID NO: 1177 - RNA, 20 nt, synthetic construct
  misc_feature 1..20: note = Synthetic
  source 1..20: mol_type = other RNA
tccattcgatgtgagccacg

SEQ ID NO: 1178 - RNA, 20 nt, synthetic construct
  misc_feature 1..20: note = Synthetic
  source 1..20: mol_type = other RNA
acaaggagacctgttccccg

SEQ ID NO: 1179 - RNA, 20 nt, synthetic construct
  misc_feature 1..20: note = Synthetic
  source 1..20: mol_type = other RNA
cgtccccgacctgttcggcg

SEQ ID NO: 1180 - RNA, 20 nt, synthetic construct
  misc_feature 1..20: note = Synthetic
  source 1..20: mol_type = other RNA
agacccacacacgccctacg

SEQ ID NO: 1181 - RNA, 20 nt, synthetic construct
  misc_feature 1..20: note = Synthetic
  source 1..20: mol_type = other RNA
actcgggctgggacacgatg

SEQ ID NO: 1182 - RNA, 20 nt, synthetic construct
  misc_feature 1..20: note = Synthetic
  source 1..20: mol_type = other RNA
tcgcagggaggcgccacccg

SEQ ID NO: 1183 - RNA, 20 nt, synthetic construct
  misc_feature 1..20: note = Synthetic
  source 1..20: mol_type = other RNA
gccagcatcctgtacctcga

SEQ ID NO: 1184 - RNA, 20 nt, synthetic construct
  misc_feature 1..20: note = Synthetic
  source 1..20: mol_type = other RNA
gtgggaccccaacatcaccg

SEQ ID NO: 1185 - RNA, 20 nt, synthetic construct
  misc_feature 1..20: note = Synthetic
  source 1..20: mol_type = other RNA
gcagagttaccgcaggtatg

SEQ ID NO: 1186 - RNA, 20 nt, synthetic construct
  misc_feature 1..20: note = Synthetic
  source 1..20: mol_type = other RNA
cagttcctgctcaccgcctg

SEQ ID NO: 1187 - RNA, 20 nt, synthetic construct
  misc_feature 1..20: note = Synthetic
  source 1..20: mol_type = other RNA
cgtagtctgctacttcagcg

SEQ ID NO: 1188 - RNA, 20 nt, synthetic construct
  misc_feature 1..20: note = Synthetic
  source 1..20: mol_type = other RNA
gggccgcatgcaccgcgtag

SEQ ID NO: 1189 - RNA, 20 nt, synthetic construct
  misc_feature 1..20: note = Synthetic
  source 1..20: mol_type = other RNA
tgtcgggggacaactacctg

SEQ ID NO: 1190 - RNA, 20 nt, synthetic construct
  misc_feature 1..20: note = Synthetic
  source 1..20: mol_type = other RNA
actgcggcaccgtcagccag

SEQ ID NO: 1191 - RNA, 20 nt, synthetic construct
  misc_feature 1..20: note = Synthetic
  source 1..20: mol_type = other RNA
ggtcagggtcaaccacaaag

SEQ ID NO: 1192 - RNA, 20 nt, synthetic construct
  misc_feature 1..20: note = Synthetic
  source 1..20: mol_type = other RNA
atgggtagattcgttccaca

SEQ ID NO: 1193 - RNA, 20 nt, synthetic construct
  misc_feature 1..20: note = Synthetic
  source 1..20: mol_type = other RNA
aaacagtcgcggagtgtctg

SEQ ID NO: 1194 - RNA, 20 nt, synthetic construct
  misc_feature 1..20: note = Synthetic
  source 1..20: mol_type = other RNA
cccgcggcacgcgcgccaag

SEQ ID NO: 1195 - RNA, 20 nt, synthetic construct
  misc_feature 1..20: note = Synthetic
  source 1..20: mol_type = other RNA
gcgaccacggaaagcccgtg

SEQ ID NO: 1196 - RNA, 20 nt, synthetic construct
  misc_feature 1..20: note = Synthetic
  source 1..20: mol_type = other RNA
cccccgacagctcccctacg

SEQ ID NO: 1197 - RNA, 20 nt, synthetic construct
  misc_feature 1..20: note = Synthetic
  source 1..20: mol_type = other RNA
cgggccgcatgcaccgcgta

SEQ ID NO: 1198 - RNA, 20 nt, synthetic construct
  misc_feature 1..20: note = Synthetic
  source 1..20: mol_type = other RNA
tggctgacggtgccgcagtc

SEQ ID NO: 1199 - RNA, 20 nt, synthetic construct
  misc_feature 1..20: note = Synthetic
  source 1..20: mol_type = other RNA
aggaggtcaggagacgccat

SEQ ID NO: 1200 - RNA, 20 nt, synthetic construct
  misc_feature 1..20: note = Synthetic
  source 1..20: mol_type = other RNA
gcgagagcatcaagccttcg

SEQ ID NO: 1201 - RNA, 20 nt, synthetic construct
  misc_feature 1..20: note = Synthetic
  source 1..20: mol_type = other RNA
ccatttccgtgagtccctcg

SEQ ID NO: 1202 - RNA, 20 nt, synthetic construct
  misc_feature 1..20: note = Synthetic
  source 1..20: mol_type = other RNA
gggagcagaccagcgcccgg

SEQ ID NO: 1203 - RNA, 20 nt, synthetic construct
  misc_feature 1..20: note = Synthetic
  source 1..20: mol_type = other RNA
cacgtcgagtctcaccggct

SEQ ID NO: 1204 - RNA, 20 nt, synthetic construct
  misc_feature 1..20: note = Synthetic
  source 1..20: mol_type = other RNA
acctgagctcatgcatggcg

SEQ ID NO: 1205 - RNA, 20 nt, synthetic construct
  misc_feature 1..20: note = Synthetic
  source 1..20: mol_type = other RNA
gcacatgcaccacatacctg

SEQ ID NO: 1206 - RNA, 20 nt, synthetic construct
  misc_feature 1..20: note = Synthetic
  source 1..20: mol_type = other RNA
gcgtagagtgagtgtgacgt

SEQ ID NO: 1207 - RNA, 20 nt, synthetic construct
  misc_feature 1..20: note = Synthetic
  source 1..20: mol_type = other RNA
cccgctcatggacaggttcg

SEQ ID NO: 1208 - RNA, 20 nt, synthetic construct
  misc_feature 1..20: note = Synthetic
  source 1..20: mol_type = other RNA
gctcatggacaggttcgagg

SEQ ID NO: 1209 - RNA, 20 nt, synthetic construct
  misc_feature 1..20: note = Synthetic
  source 1..20: mol_type = other RNA
ccgggccgcatgcaccgcgt

SEQ ID NO: 1210 - RNA, 20 nt, synthetic construct
  misc_feature 1..20: note = Synthetic
  source 1..20: mol_type = other RNA
attcgaaccagtcgggacag

SEQ ID NO: 1211 - RNA, 20 nt, synthetic construct
  misc_feature 1..20: note = Synthetic
  source 1..20: mol_type = other RNA
gggcgcccgcttcacgatgc

SEQ ID NO: 1212 - RNA, 20 nt, synthetic construct
  misc_feature 1..20: note = Synthetic
  source 1..20: mol_type = other RNA
cgccagtgccagccggactg

SEQ ID NO: 1213 - RNA, 20 nt, synthetic construct
  misc_feature 1..20: note = Synthetic
  source 1..20: mol_type = other RNA
gacgtgagggagcacctcga

SEQ ID NO: 1214 - RNA, 20 nt, synthetic construct
  misc_feature 1..20: note = Synthetic
  source 1..20: mol_type = other RNA
gggctgcagtagacccgcca

SEQ ID NO: 1215 - RNA, 20 nt, synthetic construct
  misc_feature 1..20: note = Synthetic
  source 1..20: mol_type = other RNA
tcctcctcgtagggcgtgtg

SEQ ID NO: 1216 - RNA, 20 nt, synthetic construct
  misc_feature 1..20: note = Synthetic
  source 1..20: mol_type = other RNA
ccggtggtccaggagtcgca

SEQ ID NO: 1217 - RNA, 20 nt, synthetic construct
  misc_feature 1..20: note = Synthetic
  source 1..20: mol_type = other RNA
tccccgtggctcacatcgaa

SEQ ID NO: 1218 - RNA, 20 nt, synthetic construct
  misc_feature 1..20: note = Synthetic
  source 1..20: mol_type = other RNA
cagataactctgcaccctcg

SEQ ID NO: 1219 - RNA, 20 nt, synthetic construct
  misc_feature 1..20: note = Synthetic
  source 1..20: mol_type = other RNA
agccagcatcctgtacctcg

SEQ ID NO: 1220 - RNA, 20 nt, synthetic construct
  misc_feature 1..20: note = Synthetic
  source 1..20: mol_type = other RNA
gctgtgttcttacccgcctg

SEQ ID NO: 1221 - RNA, 20 nt, synthetic construct
  misc_feature 1..20: note = Synthetic
  source 1..20: mol_type = other RNA
tgatgaaccagtacacccac

SEQ ID NO: 1222 - RNA, 20 nt, synthetic construct
  misc_feature 1..20: note = Synthetic
  source 1..20: mol_type = other RNA
cttataataaatatggtccg

SEQ ID NO: 1223 - RNA, 20 nt, synthetic construct
  misc_feature 1..20: note = Synthetic
  source 1..20: mol_type = other RNA
ttatttcagataatgcaccc

SEQ ID NO: 1224 - RNA, 20 nt, synthetic construct
  misc_feature 1..20: note = Synthetic
  source 1..20: mol_type = other RNA
tttgaatcttcatcatacga

SEQ ID NO: 1225 - RNA, 20 nt, synthetic construct
  misc_feature 1..20: note = Synthetic
  source 1..20: mol_type = other RNA
atagttacagccatacctct

SEQ ID NO: 1226 - RNA, 20 nt, synthetic construct
  misc_feature 1..20: note = Synthetic
  source 1..20: mol_type = other RNA
atgactgattctgactgtag

SEQ ID NO: 1227 - RNA, 20 nt, synthetic construct
  misc_feature 1..20: note = Synthetic
  source 1..20: mol_type = other RNA
gaatcctcctgataacatca

SEQ ID NO: 1228 - RNA, 20 nt, synthetic construct
  misc_feature 1..20: note = Synthetic
  source 1..20: mol_type = other RNA
gtatccttgatgttatcagg

SEQ ID NO: 1229 - RNA, 20 nt, synthetic construct
  misc_feature 1..20: note = Synthetic
  source 1..20: mol_type = other RNA
agatagccagcctagaggta

SEQ ID NO: 1230 - RNA, 20 nt, synthetic construct
  misc_feature 1..20: note = Synthetic
  source 1..20: mol_type = other RNA
caagttctcttcattgacca

SEQ ID NO: 1231 - RNA, 20 nt, synthetic construct
  misc_feature 1..20: note = Synthetic
  source 1..20: mol_type = other RNA
gcatcttattatcatgtcct

SEQ ID NO: 1232 - RNA, 20 nt, synthetic construct
  misc_feature 1..20: note = Synthetic
  source 1..20: mol_type = other RNA
aaggctcagtcttaccttaa

SEQ ID NO: 1233 - RNA, 20 nt, synthetic construct
  misc_feature 1..20: note = Synthetic
  source 1..20: mol_type = other RNA
ttacagccatacctctaggc

SEQ ID NO: 1234 - RNA, 20 nt, synthetic construct
  misc_feature 1..20: note = Synthetic
  source 1..20: mol_type = other RNA
tcagtcatatcttcaaatag

SEQ ID NO: 1235 - RNA, 20 nt, synthetic construct
  misc_feature 1..20: note = Synthetic
  source 1..20: mol_type = other RNA
ttctttcagagaagtgtccc

SEQ ID NO: 1236 - RNA, 20 nt, synthetic construct
  misc_feature 1..20: note = Synthetic
  source 1..20: mol_type = other RNA
tataaagatagccagcctag

SEQ ID NO: 1237 - RNA, 20 nt, synthetic construct
  misc_feature 1..20: note = Synthetic
  source 1..20: mol_type = other RNA
caaatagaggccgatttcct

SEQ ID NO: 1238 - RNA, 20 nt, synthetic construct
  misc_feature 1..20: note = Synthetic
  source 1..20: mol_type = other RNA
tgcatcttattatcatgtcc

SEQ ID NO: 1239 - RNA, 20 nt, synthetic construct
  misc_feature 1..20: note = Synthetic
  source 1..20: mol_type = other RNA
acgccgagtttgaagatcag

SEQ ID NO: 1240 - RNA, 20 nt, synthetic construct
  misc_feature 1..20: note = Synthetic
  source 1..20: mol_type = other RNA
ttcacgtccccacattactg

SEQ ID NO: 1241 - RNA, 20 nt, synthetic construct
  misc_feature 1..20: note = Synthetic
  source 1..20: mol_type = other RNA
atcatgcaaagcaattctcg

SEQ ID NO: 1242 - RNA, 20 nt, synthetic construct
  misc_feature 1..20: note = Synthetic
  source 1..20: mol_type = other RNA
aacgccgagtttgaagatca

SEQ ID NO: 1243 - RNA, 20 nt, synthetic construct
  misc_feature 1..20: note = Synthetic
  source 1..20: mol_type = other RNA
tgtaatttattggatgttcg

SEQ ID NO: 1244 - RNA, 20 nt, synthetic construct
  misc_feature 1..20: note = Synthetic
  source 1..20: mol_type = other RNA
gcagacatggctgatatccc

SEQ ID NO: 1245 - RNA, 20 nt, synthetic construct
  misc_feature 1..20: note = Synthetic
  source 1..20: mol_type = other RNA
acttccggttcgtctctacc

SEQ ID NO: 1246 - RNA, 20 nt, synthetic construct
  misc_feature 1..20: note = Synthetic
  source 1..20: mol_type = other RNA
caagccaggtagagacgaac

SEQ ID NO: 1247 - RNA, 20 nt, synthetic construct
  misc_feature 1..20: note = Synthetic
  source 1..20: mol_type = other RNA
tataagcacccaaagggtca

SEQ ID NO: 1248 - RNA, 20 nt, synthetic construct
  misc_feature 1..20: note = Synthetic
  source 1..20: mol_type = other RNA
ccccttcaaccacagtaatg

SEQ ID NO: 1249 - RNA, 20 nt, synthetic construct
  misc_feature 1..20: note = Synthetic
  source 1..20: mol_type = other RNA
cccttcaaccacagtaatgt

SEQ ID NO: 1250 - RNA, 20 nt, synthetic construct
  misc_feature 1..20: note = Synthetic
  source 1..20: mol_type = other RNA
ccccacattactgtggttga

SEQ ID NO: 1251 - RNA, 20 nt, synthetic construct
  misc_feature 1..20: note = Synthetic
  source 1..20: mol_type = other RNA
gagaattacccttgaccctt

SEQ ID NO: 1252 - RNA, 20 nt, synthetic construct
  misc_feature 1..20: note = Synthetic
  source 1..20: mol_type = other RNA
tcggcgttcttctttatcgt

SEQ ID NO: 1253 - RNA, 20 nt, synthetic construct
  misc_feature 1..20: note = Synthetic
  source 1..20: mol_type = other RNA
agatcgcagtaatatagttc

SEQ ID NO: 1254 - RNA, 20 nt, synthetic construct
  misc_feature 1..20: note = Synthetic
  source 1..20: mol_type = other RNA
gggtaattctctacaattca

SEQ ID NO: 1255 - RNA, 20 nt, synthetic construct
  misc_feature 1..20: note = Synthetic
  source 1..20: mol_type = other RNA
gcaattctcgaggaactcct

SEQ ID NO: 1256 - RNA, 20 nt, synthetic construct
  misc_feature 1..20: note = Synthetic
  source 1..20: mol_type = other RNA
cggcgttcttctttatcgtt

SEQ ID NO: 1257 - RNA, 20 nt, synthetic construct
  misc_feature 1..20: note = Synthetic
  source 1..20: mol_type = other RNA
actgcaacatggttaagctt

SEQ ID NO: 1258 - RNA, 20 nt, synthetic construct
  misc_feature 1..20: note = Synthetic
  source 1..20: mol_type = other RNA
ctcttgtgaagacgtggcct

SEQ ID NO: 1259 - RNA, 20 nt, synthetic construct
  misc_feature 1..20: note = Synthetic
  source 1..20: mol_type = other RNA
cctgtgtcattcaactcaac

SEQ ID NO: 1260 - RNA, 20 nt, synthetic construct
  misc_feature 1..20: note = Synthetic
  source 1..20: mol_type = other RNA
gaacgccgagtttgaagatc

SEQ ID NO: 1261 - RNA, 20 nt, synthetic construct
  misc_feature 1..20: note = Synthetic
  source 1..20: mol_type = other RNA
cctcttgtgaagacgtggcc

SEQ ID NO: 1262 - RNA, 20 nt, synthetic construct
  misc_feature 1..20: note = Synthetic
  source 1..20: mol_type = other RNA
caattctcgaggaactcctt

SEQ ID NO: 1263 - RNA, 20 nt, synthetic construct
  misc_feature 1..20: note = Synthetic
  source 1..20: mol_type = other RNA
aggtcgttactacccatgaa

SEQ ID NO: 1264 - RNA, 20 nt, synthetic construct
  misc_feature 1..20: note = Synthetic
  source 1..20: mol_type = other RNA
aaggagcaaccgaatcgtag

SEQ ID NO: 1265 - RNA, 20 nt, synthetic construct
  misc_feature 1..20: note = Synthetic
  source 1..20: mol_type = other RNA
agcaaggatcagacgcttgg

SEQ ID NO: 1266 - RNA, 20 nt, synthetic construct
  misc_feature 1..20: note = Synthetic
  source 1..20: mol_type = other RNA
tctaatggatctccattcga

SEQ ID NO: 1267 - RNA, 20 nt, synthetic construct
  misc_feature 1..20: note = Synthetic
  source 1..20: mol_type = other RNA
tccagcggtaacctggtaca

SEQ ID NO: 1268 - RNA, 20 nt, synthetic construct
  misc_feature 1..20: note = Synthetic
  source 1..20: mol_type = other RNA
gagcaaggatcagacgcttg

SEQ ID NO: 1269 - RNA, 20 nt, synthetic construct
  misc_feature 1..20: note = Synthetic
  source 1..20: mol_type = other RNA
taggtcgttactacccatga

SEQ ID NO: 1270 - RNA, 20 nt, synthetic construct
  misc_feature 1..20: note = Synthetic
  source 1..20: mol_type = other RNA
atgtgatgcggaatactcac

SEQ ID NO: 1271 - RNA, 20 nt, synthetic construct
  misc_feature 1..20: note = Synthetic
  source 1..20: mol_type = other RNA
gtaccggacctaccagagca

SEQ ID NO: 1272 - RNA, 20 nt, synthetic construct
  misc_feature 1..20: note = Synthetic
  source 1..20: mol_type = other RNA
acgacctatctgatgtccaa

SEQ ID NO: 1273 - RNA, 20 nt, synthetic construct
  misc_feature 1..20: note = Synthetic
  source 1..20: mol_type = other RNA
cccagaattattcacccctg

SEQ ID NO: 1274 - RNA, 20 nt, synthetic construct
  misc_feature 1..20: note = Synthetic
  source 1..20: mol_type = other RNA
accttgtaccaggttaccgc

SEQ ID NO: 1275 - RNA, 20 nt, synthetic construct
  misc_feature 1..20: note = Synthetic
  source 1..20: mol_type = other RNA
agtcggatactgtgagttcg

SEQ ID NO: 1276 - RNA, 20 nt, synthetic construct
  misc_feature 1..20: note = Synthetic
  source 1..20: mol_type = other RNA
tggtaccaacaaccttcgaa

SEQ ID NO: 1277 - RNA, 20 nt, synthetic construct
  misc_feature 1..20: note = Synthetic
  source 1..20: mol_type = other RNA
acccagaattattcacccct

SEQ ID NO: 1278 - RNA, 20 nt, synthetic construct
  misc_feature 1..20: note = Synthetic
  source 1..20: mol_type = other RNA
gttgttcaagtgagaaccat

SEQ ID NO: 1279 - RNA, 20 nt, synthetic construct
  misc_feature 1..20: note = Synthetic
  source 1..20: mol_type = other RNA
aaaactctcagggattcacg

SEQ ID NO: 1280 - RNA, 20 nt, synthetic construct
  misc_feature 1..20: note = Synthetic
  source 1..20: mol_type = other RNA
gatctccattcgaaggttgt

SEQ ID NO: 1281 - RNA, 20 nt, synthetic construct
  misc_feature 1..20: note = Synthetic
  source 1..20: mol_type = other RNA
ttcgaatggagatccattag

SEQ ID NO: 1282 - RNA, 20 nt, synthetic construct
  misc_feature 1..20: note = Synthetic
  source 1..20: mol_type = other RNA
agatattctggatcctgtcg

SEQ ID NO: 1283 - RNA, 20 nt, synthetic construct
  misc_feature 1..20: note = Synthetic
  source 1..20: mol_type = other RNA
aagcacgatttggctttgaa

SEQ ID NO: 1284 - RNA, 20 nt, synthetic construct
  misc_feature 1..20: note = Synthetic
  source 1..20: mol_type = other RNA
gcttggcaccatcgggaccc

SEQ ID NO: 1285 - RNA, 20 nt, synthetic construct
  misc_feature 1..20: note = Synthetic
  source 1..20: mol_type = other RNA
gagggcactcgccgccagca

SEQ ID NO: 1286 - RNA, 20 nt, synthetic construct
  misc_feature 1..20: note = Synthetic
  source 1..20: mol_type = other RNA
tttcaatccagtgcctgtag

SEQ ID NO: 1287 - RNA, 20 nt, synthetic construct
  misc_feature 1..20: note = Synthetic
  source 1..20: mol_type = other RNA
cgggagaacaatgctctgtt

SEQ ID NO: 1288 - RNA, 20 nt, synthetic construct
  misc_feature 1..20: note = Synthetic
  source 1..20: mol_type = other RNA
cgttactacccatgaagggc

SEQ ID NO: 1289 - RNA, 20 nt, synthetic construct
  misc_feature 1..20: note = Synthetic
  source 1..20: mol_type = other RNA
gacccagaattattcacccc

SEQ ID NO: 1290 - RNA, 20 nt, synthetic construct
  misc_feature 1..20: note = Synthetic
  source 1..20: mol_type = other RNA
gctacatcataggggctcct

SEQ ID NO: 1291 - RNA, 20 nt, synthetic construct
  misc_feature 1..20: note = Synthetic
  source 1..20: mol_type = other RNA
aaacttcatccactacgatt

SEQ ID NO: 1292 - RNA, 20 nt, synthetic construct
  misc_feature 1..20: note = Synthetic
  source 1..20: mol_type = other RNA
tcactcagcgtgatcttcgc

SEQ ID NO: 1293 - RNA, 20 nt, synthetic construct
  misc_feature 1..20: note = Synthetic
  source 1..20: mol_type = other RNA
agagcttttttcacgagatg

SEQ ID NO: 1294 - RNA, 20 nt, synthetic construct
  misc_feature 1..20: note = Synthetic
  source 1..20: mol_type = other RNA
accagctcagaattacctct

SEQ ID NO: 1295 - RNA, 20 nt, synthetic construct
  misc_feature 1..20: note = Synthetic
  source 1..20: mol_type = other RNA
ccccaggggtgaataattct

SEQ ID NO: 1296 - RNA, 20 nt, synthetic construct
  misc_feature 1..20: note = Synthetic
  source 1..20: mol_type = other RNA
ggatcctgtcgaggacacac

SEQ ID NO: 1297 - RNA, 20 nt, synthetic construct
  misc_feature 1..20: note = Synthetic
  source 1..20: mol_type = other RNA
tctcagtacctgaggcgaaa

SEQ ID NO: 1298 - RNA, 20 nt, synthetic construct
  misc_feature 1..20: note = Synthetic
  source 1..20: mol_type = other RNA
cggcgagtgccctcctctac

SEQ ID NO: 1299 - RNA, 20 nt, synthetic construct
  misc_feature 1..20: note = Synthetic
  source 1..20: mol_type = other RNA
ttgaaatagtgctgctgtac

SEQ ID NO: 1300 - RNA, 20 nt, synthetic construct
  misc_feature 1..20: note = Synthetic
  source 1..20: mol_type = other RNA
caagcgtctgatccttgctc

SEQ ID NO: 1301 - RNA, 20 nt, synthetic construct
  misc_feature 1..20: note = Synthetic
  source 1..20: mol_type = other RNA
agagcaaggatcagacgctt

SEQ ID NO: 1302 - RNA, 20 nt, synthetic construct
  misc_feature 1..20: note = Synthetic
  source 1..20: mol_type = other RNA
aagcctctccaagtaactgt

SEQ ID NO: 1303 - RNA, 20 nt, synthetic construct
  misc_feature 1..20: note = Synthetic
  source 1..20: mol_type = other RNA
ttctttcagttggacggact

SEQ ID NO: 1304 - RNA, 20 nt, synthetic construct
  misc_feature 1..20: note = Synthetic
  source 1..20: mol_type = other RNA
ctgggtccattgacatagtt

SEQ ID NO: 1305 - RNA, 20 nt, synthetic construct
  misc_feature 1..20: note = Synthetic
  source 1..20: mol_type = other RNA
aggcatgtggtagcgcattt

SEQ ID NO: 1306 - RNA, 20 nt, synthetic construct
  misc_feature 1..20: note = Synthetic
  source 1..20: mol_type = other RNA
gttgcaggagagcgaattaa

SEQ ID NO: 1307 - RNA, 20 nt, synthetic construct
  misc_feature 1..20: note = Synthetic
  source 1..20: mol_type = other RNA
cacaaagtccagcggtaacc

SEQ ID NO: 1308 - RNA, 20 nt, synthetic construct
  misc_feature 1..20: note = Synthetic
  source 1..20: mol_type = other RNA
gctttgcagctaatagttaa

SEQ ID NO: 1309 - RNA, 20 nt, synthetic construct
  misc_feature 1..20: note = Synthetic
  source 1..20: mol_type = other RNA
attagctgcaaagcacgatt

SEQ ID NO: 1310 - RNA, 20 nt, synthetic construct
  misc_feature 1..20: note = Synthetic
  source 1..20: mol_type = other RNA
actgggtccattgacatagt

SEQ ID NO: 1311 - RNA, 20 nt, synthetic construct
  misc_feature 1..20: note = Synthetic
  source 1..20: mol_type = other RNA
tgtgctacacggatacccca

SEQ ID NO: 1312 - RNA, 20 nt, synthetic construct
  misc_feature 1..20: note = Synthetic
  source 1..20: mol_type = other RNA
gatgctataactacgattcg

SEQ ID NO: 1313 - RNA, 20 nt, synthetic construct
  misc_feature 1..20: note = Synthetic
  source 1..20: mol_type = other RNA
gcgcacaaatcccttctacc

SEQ ID NO: 1314 - RNA, 20 nt, synthetic construct
  misc_feature 1..20: note = Synthetic
  source 1..20: mol_type = other RNA
agatgtgtttgctcccagcg

SEQ ID NO: 1315 - RNA, 20 nt, synthetic construct
  misc_feature 1..20: note = Synthetic
  source 1..20: mol_type = other RNA
ctcccattctactgatatcg

SEQ ID NO: 1316 - RNA, 20 nt, synthetic construct
  misc_feature 1..20: note = Synthetic
  source 1..20: mol_type = other RNA
aacacatctgacctacaggt

SEQ ID NO: 1317 - RNA, 20 nt, synthetic construct
  misc_feature 1..20: note = Synthetic
  source 1..20: mol_type = other RNA
gagctcaacttccgggtaga

SEQ ID NO: 1318 - RNA, 20 nt, synthetic construct
  misc_feature 1..20: note = Synthetic
  source 1..20: mol_type = other RNA
tgatgctataactacgattc

SEQ ID NO: 1319 - RNA, 20 nt, synthetic construct
  misc_feature 1..20: note = Synthetic
  source 1..20: mol_type = other RNA
tcactgaggggaaccctcgc

SEQ ID NO: 1320 - RNA, 20 nt, synthetic construct
  misc_feature 1..20: note = Synthetic
  source 1..20: mol_type = other RNA
gatggcatccaagccatata

SEQ ID NO: 1321 - RNA, 20 nt, synthetic construct
  misc_feature 1..20: note = Synthetic
  source 1..20: mol_type = other RNA
tcgtttatattcatcatacc

SEQ ID NO: 1322 - RNA, 20 nt, synthetic construct
  misc_feature 1..20: note = Synthetic
  source 1..20: mol_type = other RNA
gattggcagggaataagtac

SEQ ID NO: 1323 - RNA, 20 nt, synthetic construct
  misc_feature 1..20: note = Synthetic
  source 1..20: mol_type = other RNA
agctcaacttccgggtagaa

SEQ ID NO: 1324 - RNA, 20 nt, synthetic construct
  misc_feature 1..20: note = Synthetic
  source 1..20: mol_type = other RNA
ttgatgctataactacgatt

SEQ ID NO: 1325 - RNA, 20 nt, synthetic construct
  misc_feature 1..20: note = Synthetic
  source 1..20: mol_type = other RNA
cttactgtcacacgcttttg

SEQ ID NO: 1326 - RNA, 20 nt, synthetic construct
  misc_feature 1..20: note = Synthetic
  source 1..20: mol_type = other RNA
taccctagctacaccttcag

SEQ ID NO: 1327 - RNA, 20 nt, synthetic construct
  misc_feature 1..20: note = Synthetic
  source 1..20: mol_type = other RNA
caccactgaaggtgtagcta

SEQ ID NO: 1328 - RNA, 20 nt, synthetic construct
  misc_feature 1..20: note = Synthetic
  source 1..20: mol_type = other RNA
tataaacgatctatggatcc

SEQ ID NO: 1329 - RNA, 20 nt, synthetic construct
  misc_feature 1..20: note = Synthetic
  source 1..20: mol_type = other RNA
tgatgaatataaacgatcta

SEQ ID NO: 1330 - RNA, 20 nt, synthetic construct
  misc_feature 1..20: note = Synthetic
  source 1..20: mol_type = other RNA
gcaagatgtggacttagtcc

SEQ ID NO: 1331 - RNA, 20 nt, synthetic construct
  misc_feature 1..20: note = Synthetic
  source 1..20: mol_type = other RNA
aatcgtagttatagcatcaa

SEQ ID NO: 1332 - RNA, 20 nt, synthetic construct
  misc_feature 1..20: note = Synthetic
  source 1..20: mol_type = other RNA
catactcaccatatatggct

SEQ ID NO: 1333 - RNA, 20 nt, synthetic construct
  misc_feature 1..20: note = Synthetic
  source 1..20: mol_type = other RNA
tcaccactgaaggtgtagct

SEQ ID NO: 1334 - RNA, 20 nt, synthetic construct
  misc_feature 1..20: note = Synthetic
  source 1..20: mol_type = other RNA
aaaccggacttcatctctgt

SEQ ID NO: 1335 - RNA, 20 nt, synthetic construct
  misc_feature 1..20: note = Synthetic
  source 1..20: mol_type = other RNA
tggtgatgttcagctagctc

SEQ ID NO: 1336 - RNA, 20 nt, synthetic construct
  misc_feature 1..20: note = Synthetic
  source 1..20: mol_type = other RNA
agccccgatatcagtagaat

SEQ ID NO: 1337 - RNA, 20 nt, synthetic construct
  misc_feature 1..20: note = Synthetic
  source 1..20: mol_type = other RNA
ctaatagctggttcaactgc

SEQ ID NO: 1338 - RNA, 20 nt, synthetic construct
  misc_feature 1..20: note = Synthetic
  source 1..20: mol_type = other RNA
agcttactgtcacacgcttt

SEQ ID NO: 1339 - RNA, 20 nt, synthetic construct
  misc_feature 1..20: note = Synthetic
  source 1..20: mol_type = other RNA
gcttactgtcacacgctttt

SEQ ID NO: 1340 - RNA, 20 nt, synthetic construct
  misc_feature 1..20: note = Synthetic
  source 1..20: mol_type = other RNA
tgagcatcccctccaatacc

SEQ ID NO: 1341 - RNA, 20 nt, synthetic construct
  misc_feature 1..20: note = Synthetic
  source 1..20: mol_type = other RNA
gctatcattttgggataacc

SEQ ID NO: 1342 - RNA, 20 nt, synthetic construct
  misc_feature 1..20: note = Synthetic
  source 1..20: mol_type = other RNA
cacacgcttttggggtttgt

SEQ ID NO: 1343 - RNA, 20 nt, synthetic construct
  misc_feature 1..20: note = Synthetic
  source 1..20: mol_type = other RNA
tggcttacctctgaaattgt

SEQ ID NO: 1344 - RNA, 20 nt, synthetic construct
  misc_feature 1..20: note = Synthetic
  source 1..20: mol_type = other RNA
gtcgcggtcgtagtcctcag

SEQ ID NO: 1345 - RNA, 20 nt, synthetic construct
  misc_feature 1..20: note = Synthetic
  source 1..20: mol_type = other RNA
ccgctggtgcggcaccactg

SEQ ID NO: 1346 - RNA, 20 nt, synthetic construct
  misc_feature 1..20: note = Synthetic
  source 1..20: mol_type = other RNA
acatctgggttgccgcagcg

SEQ ID NO: 1347 - RNA, 20 nt, synthetic construct
  misc_feature 1..20: note = Synthetic
  source 1..20: mol_type = other RNA
gattcgagaaaaccgcagtg

SEQ ID NO: 1348 - RNA, 20 nt, synthetic construct
  misc_feature 1..20: note = Synthetic
  source 1..20: mol_type = other RNA
gccagggagcgctacgatgg

SEQ ID NO: 1349 - RNA, 20 nt, synthetic construct
  misc_feature 1..20: note = Synthetic
  source 1..20: mol_type = other RNA
atggaggcgctaatggcccg

SEQ ID NO: 1350 - RNA, 20 nt, synthetic construct
  misc_feature 1..20: note = Synthetic
  source 1..20: mol_type = other RNA
gatgatgggcgacggcgcgg

SEQ ID NO: 1351 - RNA, 20 nt, synthetic construct
  misc_feature 1..20: note = Synthetic
  source 1..20: mol_type = other RNA
tacgatgatgaccgcaagtg

SEQ ID NO: 1352 - RNA, 20 nt, synthetic construct
  misc_feature 1..20: note = Synthetic
  source 1..20: mol_type = other RNA
accatgcggaagccacgctg

SEQ ID NO: 1353 - RNA, 20 nt, synthetic construct
  misc_feature 1..20: note = Synthetic
  source 1..20: mol_type = other RNA
gtccgtccttaccgtcaaag

SEQ ID NO: 1354 - RNA, 20 nt, synthetic construct
  misc_feature 1..20: note = Synthetic
  source 1..20: mol_type = other RNA
tccttcagcgttgccgccca

SEQ ID NO: 1355 - RNA, 20 nt, synthetic construct
  misc_feature 1..20: note = Synthetic
  source 1..20: mol_type = other RNA
cttgatgatgggcgacggcg

SEQ ID NO: 1356 - RNA, 20 nt, synthetic construct
  misc_feature 1..20: note = Synthetic
  source 1..20: mol_type = other RNA
accagcggtagccatccgtg

SEQ ID NO: 1357 - RNA, 20 nt, synthetic construct
  misc_feature 1..20: note = Synthetic
  source 1..20: mol_type = other RNA
cttggggtaccctcgctcca

SEQ ID NO: 1358 - RNA, 20 nt, synthetic construct
  misc_feature 1..20: note = Synthetic
  source 1..20: mol_type = other RNA
gccgccctgcaggtccacga

SEQ ID NO: 1359 - RNA, 20 nt, synthetic construct
  misc_feature 1..20: note = Synthetic
  source 1..20: mol_type = other RNA
gatgccgtcgtggacctgca

SEQ ID NO: 1360 - RNA, 20 nt, synthetic construct
  misc_feature 1..20: note = Synthetic
  source 1..20: mol_type = other RNA
ttgtcccacttgggcttgcg

SEQ ID NO: 1361 - RNA, 20 nt, synthetic construct
  misc_feature 1..20: note = Synthetic
  source 1..20: mol_type = other RNA
gagtccgtccttaccgtcaa

SEQ ID NO: 1362 - RNA, 20 nt, synthetic construct
  misc_feature 1..20: note = Synthetic
  source 1..20: mol_type = other RNA
gacgatgagctatggacctt

SEQ ID NO: 1363 - RNA, 20 nt, synthetic construct
  misc_feature 1..20: note = Synthetic
  source 1..20: mol_type = other RNA
accatgggcggcaacgctga

SEQ ID NO: 1364 - RNA, 20 nt, synthetic construct
  misc_feature 1..20: note = Synthetic
  source 1..20: mol_type = other RNA
acggatggctaccgctggtg

SEQ ID NO: 1365 - RNA, 20 nt, synthetic construct
  misc_feature 1..20: note = Synthetic
  source 1..20: mol_type = other RNA
accacatctttccgtcactg

SEQ ID NO: 1366 - RNA, 20 nt, synthetic construct
  misc_feature 1..20: note = Synthetic
  source 1..20: mol_type = other RNA
ctacgatgatgaccgcaagt

SEQ ID NO: 1367 - RNA, 20 nt, synthetic construct
  misc_feature 1..20: note = Synthetic
  source 1..20: mol_type = other RNA
gatggcatcgctcagatccg

SEQ ID NO: 1368 - RNA, 20 nt, synthetic construct
  misc_feature 1..20: note = Synthetic
  source 1..20: mol_type = other RNA
aaagattgatgcggtatacg

SEQ ID NO: 1369 - RNA, 20 nt, synthetic construct
  misc_feature 1..20: note = Synthetic
  source 1..20: mol_type = other RNA
cgacggcatccaggttatcg

SEQ ID NO: 1370 - RNA, 20 nt, synthetic construct
  misc_feature 1..20: note = Synthetic
  source 1..20: mol_type = other RNA
gccgcagcgtggcttccgca

SEQ ID NO: 1371 - RNA, 20 nt, synthetic construct
  misc_feature 1..20: note = Synthetic
  source 1..20: mol_type = other RNA
tgacgatgagctatggacct

SEQ ID NO: 1372 - RNA, 20 nt, synthetic construct
  misc_feature 1..20: note = Synthetic
  source 1..20: mol_type = other RNA
ttagtggtccgtgtgaagta

SEQ ID NO: 1373 - RNA, 20 nt, synthetic construct
  misc_feature 1..20: note = Synthetic
  source 1..20: mol_type = other RNA
agtggcacccaccggtctca

SEQ ID NO: 1374 - RNA, 20 nt, synthetic construct
  misc_feature 1..20: note = Synthetic
  source 1..20: mol_type = other RNA
gccgcagtgacggaaagatg

SEQ ID NO: 1375 - RNA, 20 nt, synthetic construct
  misc_feature 1..20: note = Synthetic
  source 1..20: mol_type = other RNA
agggcctcgtaccttggtca

SEQ ID NO: 1376 - RNA, 20 nt, synthetic construct
  misc_feature 1..20: note = Synthetic
  source 1..20: mol_type = other RNA
caaactcgtgggctgccacg

SEQ ID NO: 1377 - RNA, 20 nt, synthetic construct
  misc_feature 1..20: note = Synthetic
  source 1..20: mol_type = other RNA
catggcgtggccaaactcgt

SEQ ID NO: 1378 - RNA, 20 nt, synthetic construct
  misc_feature 1..20: note = Synthetic
  source 1..20: mol_type = other RNA
tccactcgctggacatcagg

SEQ ID NO: 1379 - RNA, 20 nt, synthetic construct
  misc_feature 1..20: note = Synthetic
  source 1..20: mol_type = other RNA
taaaggcggcatccactcgc

SEQ ID NO: 1380 - RNA, 20 nt, synthetic construct
  misc_feature 1..20: note = Synthetic
  source 1..20: mol_type = other RNA
atggcccggggcgcgctcac

SEQ ID NO: 1381 - RNA, 20 nt, synthetic construct
  misc_feature 1..20: note = Synthetic
  source 1..20: mol_type = other RNA
gcgcgctcacgggtcccctg

SEQ ID NO: 1382 - RNA, 20 nt, synthetic construct
  misc_feature 1..20: note = Synthetic
  source 1..20: mol_type = other RNA
tcgccggggaacttgatgat

SEQ ID NO: 1383 - RNA, 20 nt, synthetic construct
  misc_feature 1..20: note = Synthetic
  source 1..20: mol_type = other RNA
tggcttccgcatggtctcga

SEQ ID NO: 1384 - RNA, 20 nt, synthetic construct
  misc_feature 1..20: note = Synthetic
  source 1..20: mol_type = other RNA
tggattcgagaaaaccgcag

SEQ ID NO: 1385 - RNA, 20 nt, synthetic construct
  misc_feature 1..20: note = Synthetic
  source 1..20: mol_type = other RNA
cggttttctcgaatccatga

SEQ ID NO: 1386 - RNA, 20 nt, synthetic construct
  misc_feature 1..20: note = Synthetic
  source 1..20: mol_type = other RNA
tgaagtatgggaacgccgat

SEQ ID NO: 1387 - RNA, 20 nt, synthetic construct
  misc_feature 1..20: note = Synthetic
  source 1..20: mol_type = other RNA
gaagtatgggaacgccgatg

SEQ ID NO: 1388 - RNA, 20 nt, synthetic construct
  misc_feature 1..20: note = Synthetic
  source 1..20: mol_type = other RNA
cctcagtggtgccgcaccag

SEQ ID NO: 1389 - RNA, 20 nt, synthetic construct
  misc_feature 1..20: note = Synthetic
  source 1..20: mol_type = other RNA
tacgaccgcgacaagaagta

SEQ ID NO: 1390 - RNA, 20 nt, synthetic construct
  misc_feature 1..20: note = Synthetic
  source 1..20: mol_type = other RNA
gctcccggaaaagattgatg

SEQ ID NO: 1391 - RNA, 20 nt, synthetic construct
  misc_feature 1..20: note = Synthetic
  source 1..20: mol_type = other RNA
gcttggggtaccctcgctcc

SEQ ID NO: 1392 - RNA, 20 nt, synthetic construct
  misc_feature 1..20: note = Synthetic
  source 1..20: mol_type = other RNA
gtacgagctggatacccaag

SEQ ID NO: 1393 - RNA, 20 nt, synthetic construct
  misc_feature 1..20: note = Synthetic
  source 1..20: mol_type = other RNA
aatcctactgttgctgtgcg

SEQ ID NO: 1394 - RNA, 20 nt, synthetic construct
  misc_feature 1..20: note = Synthetic
  source 1..20: mol_type = other RNA
cacggttggagggaaaccta

SEQ ID NO: 1395 - RNA, 20 nt, synthetic construct
  misc_feature 1..20: note = Synthetic
  source 1..20: mol_type = other RNA
cttgctagtaacttcatatg

SEQ ID NO: 1396 - RNA, 20 nt, synthetic construct
  misc_feature 1..20: note = Synthetic
  source 1..20: mol_type = other RNA
caggttccgtgggtaccagg

SEQ ID NO: 1397 - RNA, 20 nt, synthetic construct
  misc_feature 1..20: note = Synthetic
  source 1..20: mol_type = other RNA
tatgcggcatccacgcctga

SEQ ID NO: 1398 - RNA, 20 nt, synthetic construct
  misc_feature 1..20: note = Synthetic
  source 1..20: mol_type = other RNA
tcgattttcctcacggttgg

SEQ ID NO: 1399 - RNA, 20 nt, synthetic construct
  misc_feature 1..20: note = Synthetic
  source 1..20: mol_type = other RNA
tgctcagcctatccattgga

SEQ ID NO: 1400 - RNA, 20 nt, synthetic construct
  misc_feature 1..20: note = Synthetic
  source 1..20: mol_type = other RNA
cgattttcctcacggttgga

SEQ ID NO: 1401 - RNA, 20 nt, synthetic construct
  misc_feature 1..20: note = Synthetic
  source 1..20: mol_type = other RNA
aatcaattctgggctatcag

SEQ ID NO: 1402 - RNA, 20 nt, synthetic construct
  misc_feature 1..20: note = Synthetic
  source 1..20: mol_type = other RNA
gcgcatcacctccagagtgt

SEQ ID NO: 1403 - RNA, 20 nt, synthetic construct
  misc_feature 1..20: note = Synthetic
  source 1..20: mol_type = other RNA
tcacggttggagggaaacct

SEQ ID NO: 1404 - RNA, 20 nt, synthetic construct
  misc_feature 1..20: note = Synthetic
  source 1..20: mol_type = other RNA
acttttggcgcaaatccctc

SEQ ID NO: 1405 - RNA, 20 nt, synthetic construct
  misc_feature 1..20: note = Synthetic
  source 1..20: mol_type = other RNA
gagacaggcggaaccgagtc

SEQ ID NO: 1406 - RNA, 20 nt, synthetic construct
  misc_feature 1..20: note = Synthetic
  source 1..20: mol_type = other RNA
tacctgaacaaggttcatgc

SEQ ID NO: 1407 - RNA, 20 nt, synthetic construct
  misc_feature 1..20: note = Synthetic
  source 1..20: mol_type = other RNA
gcatcgattttcctcacggt

SEQ ID NO: 1408 - RNA, 20 nt, synthetic construct
  misc_feature 1..20: note = Synthetic
  source 1..20: mol_type = other RNA
cgcatatgaagttactagca

SEQ ID NO: 1409 - RNA, 20 nt, synthetic construct
  misc_feature 1..20: note = Synthetic
  source 1..20: mol_type = other RNA
tctggagggacaggttccgt

SEQ ID NO: 1410 - RNA, 20 nt, synthetic construct
  misc_feature 1..20: note = Synthetic
  source 1..20: mol_type = other RNA
tgggcatctccattaatccc

SEQ ID NO: 1411 - RNA, 20 nt, synthetic construct
  misc_feature 1..20: note = Synthetic
  source 1..20: mol_type = other RNA
gaagctggactccgacactc

SEQ ID NO: 1412 - RNA, 20 nt, synthetic construct
  misc_feature 1..20: note = Synthetic
  source 1..20: mol_type = other RNA
tgcagctccatccaatggat

SEQ ID NO: 1413 - RNA, 20 nt, synthetic construct
  misc_feature 1..20: note = Synthetic
  source 1..20: mol_type = other RNA
tcacagttggctggcgtccc

SEQ ID NO: 1414 - RNA, 20 nt, synthetic construct
  misc_feature 1..20: note = Synthetic
  source 1..20: mol_type = other RNA
ttctggagggacaggttccg

SEQ ID NO: 1415 - RNA, 20 nt, synthetic construct
  misc_feature 1..20: note = Synthetic
  source 1..20: mol_type = other RNA
gcatgggccaaaacatttcc

SEQ ID NO: 1416 - RNA, 20 nt, synthetic construct
  misc_feature 1..20: note = Synthetic
  source 1..20: mol_type = other RNA
gttctgaagtgaccaacatc

SEQ ID NO: 1417 - RNA, 20 nt, synthetic construct
  misc_feature 1..20: note = Synthetic
  source 1..20: mol_type = other RNA
caccagcatgaaccttgttc

SEQ ID NO: 1418 - RNA, 20 nt, synthetic construct
  misc_feature 1..20: note = Synthetic
  source 1..20: mol_type = other RNA
cgatgaggatgaacgctgga

SEQ ID NO: 1419 - RNA, 20 nt, synthetic construct
  misc_feature 1..20: note = Synthetic
  source 1..20: mol_type = other RNA
atgattggctttgcgcgagg

SEQ ID NO: 1420 - RNA, 20 nt, synthetic construct
  misc_feature 1..20: note = Synthetic
  source 1..20: mol_type = other RNA
atcatgattggctttgcgcg

SEQ ID NO: 1421 - RNA, 20 nt, synthetic construct
  misc_feature 1..20: note = Synthetic
  source 1..20: mol_type = other RNA
aatcgatccactgtaatatg

SEQ ID NO: 1422 - RNA, 20 nt, synthetic construct
  misc_feature 1..20: note = Synthetic
  source 1..20: mol_type = other RNA
agacttaccgcatattacag

SEQ ID NO: 1423 - RNA, 20 nt, synthetic construct
  misc_feature 1..20: note = Synthetic
  source 1..20: mol_type = other RNA
gttcatgagttgcagcatac

SEQ ID NO: 1424 - RNA, 20 nt, synthetic construct
  misc_feature 1..20: note = Synthetic
  source 1..20: mol_type = other RNA
agtggatcgattagtgtcaa

SEQ ID NO: 1425 - RNA, 20 nt, synthetic construct
  misc_feature 1..20: note = Synthetic
  source 1..20: mol_type = other RNA
gcagtgatgtatccaaccta

SEQ ID NO: 1426 - RNA, 20 nt, synthetic construct
  misc_feature 1..20: note = Synthetic
  source 1..20: mol_type = other RNA
tgatgggccaggaaacacgc

SEQ ID NO: 1427 - RNA, 20 nt, synthetic construct
  misc_feature 1..20: note = Synthetic
  source 1..20: mol_type = other RNA
catcactgcattaggatcag

SEQ ID NO: 1428 - RNA, 20 nt, synthetic construct
  misc_feature 1..20: note = Synthetic
  source 1..20: mol_type = other RNA
tggacggatggtagcagtct

SEQ ID NO: 1429 - RNA, 20 nt, synthetic construct
  misc_feature 1..20: note = Synthetic
  source 1..20: mol_type = other RNA
aggagatgctcacttcgatg

SEQ ID NO: 1430 - RNA, 20 nt, synthetic construct
  misc_feature 1..20: note = Synthetic
  source 1..20: mol_type = other RNA
ctgcattatttctatgacgc

SEQ ID NO: 1431 - RNA, 20 nt, synthetic construct
  misc_feature 1..20: note = Synthetic
  source 1..20: mol_type = other RNA
gggactcctacccatttgat

SEQ ID NO: 1432 - RNA, 20 nt, synthetic construct
  misc_feature 1..20: note = Synthetic
  source 1..20: mol_type = other RNA
cttccaaagtggtcacctac

SEQ ID NO: 1433 - RNA, 20 nt, synthetic construct
  misc_feature 1..20: note = Synthetic
  source 1..20: mol_type = other RNA
ggggactcctacccatttga

SEQ ID NO: 1434 - RNA, 20 nt, synthetic construct
  misc_feature 1..20: note = Synthetic
  source 1..20: mol_type = other RNA
tctgcattatttctatgacg

SEQ ID NO: 1435 - RNA, 20 nt, synthetic construct
  misc_feature 1..20: note = Synthetic
  source 1..20: mol_type = other RNA
tcctacccatttgatgggcc

SEQ ID NO: 1436 - RNA, 20 nt, synthetic construct
  misc_feature 1..20: note = Synthetic
  source 1..20: mol_type = other RNA
agtgagtattctgcaacatc

SEQ ID NO: 1437 - RNA, 20 nt, synthetic construct
  misc_feature 1..20: note = Synthetic
  source 1..20: mol_type = other RNA
gatgctatcaccacactccg

SEQ ID NO: 1438 - RNA, 20 nt, synthetic construct
  misc_feature 1..20: note = Synthetic
  source 1..20: mol_type = other RNA
gcaaccagtatcagtctaca

SEQ ID NO: 1439 - RNA, 20 nt, synthetic construct
  misc_feature 1..20: note = Synthetic
  source 1..20: mol_type = other RNA
tcaattgcttggacgctgct

SEQ ID NO: 1440 - RNA, 20 nt, synthetic construct
  misc_feature 1..20: note = Synthetic
  source 1..20: mol_type = other RNA
agttagtgcgttcccacttg

SEQ ID NO: 1441 - RNA, 20 nt, synthetic construct
  misc_feature 1..20: note = Synthetic
  source 1..20: mol_type = other RNA
atgatgaaaaagcctcgctg

SEQ ID NO: 1442 - RNA, 20 nt, synthetic construct
  misc_feature 1..20: note = Synthetic
  source 1..20: mol_type = other RNA
tgtgacggggaagccaaatg

SEQ ID NO: 1443 - RNA, 20 nt, synthetic construct
  misc_feature 1..20: note = Synthetic
  source 1..20: mol_type = other RNA
cagcctgtataccagttgga

SEQ ID NO: 1444 - RNA, 20 nt, synthetic construct
  misc_feature 1..20: note = Synthetic
  source 1..20: mol_type = other RNA
ttggtccagtaggttggata

SEQ ID NO: 1445 - RNA, 20 nt, synthetic construct
  misc_feature 1..20: note = Synthetic
  source 1..20: mol_type = other RNA
ctccctcaagatgacatcga

SEQ ID NO: 1446 - RNA, 20 nt, synthetic construct
  misc_feature 1..20: note = Synthetic
  source 1..20: mol_type = other RNA
gtagactgatactggttgct

SEQ ID NO: 1447 - RNA, 20 nt, synthetic construct
  misc_feature 1..20: note = Synthetic
  source 1..20: mol_type = other RNA
aagtatttctccacggagtg

SEQ ID NO: 1448 - RNA, 20 nt, synthetic construct
  misc_feature 1..20: note = Synthetic
  source 1..20: mol_type = other RNA
atgccatcgatgtcatcttg

SEQ ID NO: 1449 - RNA, 20 nt, synthetic construct
  misc_feature 1..20: note = Synthetic
  source 1..20: mol_type = other RNA
cttgattaacttacttgcgg

SEQ ID NO: 1450 - RNA, 20 nt, synthetic construct
  misc_feature 1..20: note = Synthetic
  source 1..20: mol_type = other RNA
accctagagatatcacctgt

SEQ ID NO: 1451 - RNA, 20 nt, synthetic construct
  misc_feature 1..20: note = Synthetic
  source 1..20: mol_type = other RNA
ggtggttttatgttaacccc

SEQ ID NO: 1452 - RNA, 20 nt, synthetic construct
  misc_feature 1..20: note = Synthetic
  source 1..20: mol_type = other RNA
taagcagcctgtataccagt

SEQ ID NO: 1453 - RNA, 20 nt, synthetic construct
  misc_feature 1..20: note = Synthetic
  source 1..20: mol_type = other RNA
agcatagttgggatacatca

SEQ ID NO: 1454 - RNA, 20 nt, synthetic construct
  misc_feature 1..20: note = Synthetic
  source 1..20: mol_type = other RNA
cccaaggatatatcaaacta

SEQ ID NO: 1455 - RNA, 20 nt, synthetic construct
  misc_feature 1..20: note = Synthetic
  source 1..20: mol_type = other RNA
aacgcactaacttgacctac

SEQ ID NO: 1456 - RNA, 20 nt, synthetic construct
  misc_feature 1..20: note = Synthetic
  source 1..20: mol_type = other RNA
ggttatcccaaaagcatatc

SEQ ID NO: 1457 - RNA, 20 nt, synthetic construct
  misc_feature 1..20: note = Synthetic
  source 1..20: mol_type = other RNA
gatatgcttttgggataacc

SEQ ID NO: 1458 - RNA, 20 nt, synthetic construct
  misc_feature 1..20: note = Synthetic
  source 1..20: mol_type = other RNA
atcccttccaactggtatac

SEQ ID NO: 1459 - RNA, 20 nt, synthetic construct
  misc_feature 1..20: note = Synthetic
  source 1..20: mol_type = other RNA
aagttagtgcgttcccactt

SEQ ID NO: 1460 - RNA, 20 nt, synthetic construct
  misc_feature 1..20: note = Synthetic
  source 1..20: mol_type = other RNA
tttttgggttgaatgtgacg

SEQ ID NO: 1461 - RNA, 20 nt, synthetic construct
  misc_feature 1..20: note = Synthetic
  source 1..20: mol_type = other RNA
tgccatcgatgtcatcttga

SEQ ID NO: 1462 - RNA, 20 nt, synthetic construct
  misc_feature 1..20: note = Synthetic
  source 1..20: mol_type = other RNA
caagttagtgcgttcccact

SEQ ID NO: 1463 - RNA, 20 nt, synthetic construct
  misc_feature 1..20: note = Synthetic
  source 1..20: mol_type = other RNA
aaacagctgcgtcaattgct

SEQ ID NO: 1464 - RNA, 20 nt, synthetic construct
  misc_feature 1..20: note = Synthetic
  source 1..20: mol_type = other RNA
attgacaggcaaccaatact

SEQ ID NO: 1465 - RNA, 20 nt, synthetic construct
  misc_feature 1..20: note = Synthetic
  source 1..20: mol_type = other RNA
ccgttaggtacttctggaga

SEQ ID NO: 1466 - RNA, 20 nt, synthetic construct
  misc_feature 1..20: note = Synthetic
  source 1..20: mol_type = other RNA
aaatgtcaaactggggtcac

SEQ ID NO: 1467 - RNA, 20 nt, synthetic construct
  misc_feature 1..20: note = Synthetic
  source 1..20: mol_type = other RNA
cttggtccagtaggttggat

SEQ ID NO: 1468 - RNA, 20 nt, synthetic construct
  misc_feature 1..20: note = Synthetic
  source 1..20: mol_type = other RNA
gtatcccaactatgctttca

SEQ ID NO: 1469 - RNA, 20 nt, synthetic construct
  misc_feature 1..20: note = Synthetic
  source 1..20: mol_type = other RNA
ggcatgagcaaggattccat

SEQ ID NO: 1470 - RNA, 20 nt, synthetic construct
  misc_feature 1..20: note = Synthetic
  source 1..20: mol_type = other RNA
gtttacgttacctccagaat

SEQ ID NO: 1471 - RNA, 20 nt, synthetic construct
  misc_feature 1..20: note = Synthetic
  source 1..20: mol_type = other RNA
gtcaattgcttggacgctgc

SEQ ID NO: 1472 - RNA, 20 nt, synthetic construct
  misc_feature 1..20: note = Synthetic
  source 1..20: mol_type = other RNA
taacttacttgcggaggtgt

SEQ ID NO: 1473 - RNA, 20 nt, synthetic construct
  misc_feature 1..20: note = Synthetic
  source 1..20: mol_type = other RNA
agatcaaatgcgtaatatct

SEQ ID NO: 1474 - RNA, 20 nt, synthetic construct
  misc_feature 1..20: note = Synthetic
  source 1..20: mol_type = other RNA
tttcctacttacgttcttgc

SEQ ID NO: 1475 - RNA, 20 nt, synthetic construct
  misc_feature 1..20: note = Synthetic
  source 1..20: mol_type = other RNA
caagttcatgagcagcaacg

SEQ ID NO: 1476 - RNA, 20 nt, synthetic construct
  misc_feature 1..20: note = Synthetic
  source 1..20: mol_type = other RNA
gtacaagcaggttatccaag

SEQ ID NO: 1477 - RNA, 20 nt, synthetic construct
  misc_feature 1..20: note = Synthetic
  source 1..20: mol_type = other RNA
tcacatcatcttgcgaaagg

SEQ ID NO: 1478 - RNA, 20 nt, synthetic construct
  misc_feature 1..20: note = Synthetic
  source 1..20: mol_type = other RNA
ttgcagcggacaaatactgg

SEQ ID NO: 1479 - RNA, 20 nt, synthetic construct
  misc_feature 1..20: note = Synthetic
  source 1..20: mol_type = other RNA
atcttgcgaaaggcggaact

SEQ ID NO: 1480 - RNA, 20 nt, synthetic construct
  misc_feature 1..20: note = Synthetic
  source 1..20: mol_type = other RNA
agtcatcagctattagtcta

SEQ ID NO: 1481 - RNA, 20 nt, synthetic construct
  misc_feature 1..20: note = Synthetic
  source 1..20: mol_type = other RNA
gagctgaagtgaccaacgtc

SEQ ID NO: 1482 - RNA, 20 nt, synthetic construct
  misc_feature 1..20: note = Synthetic
  source 1..20: mol_type = other RNA
tccaagaggcatccataccc

SEQ ID NO: 1483 - RNA, 20 nt, synthetic construct
  misc_feature 1..20: note = Synthetic
  source 1..20: mol_type = other RNA
atttttggcgaagatcccac

SEQ ID NO: 1484 - RNA, 20 nt, synthetic construct
  misc_feature 1..20: note = Synthetic
  source 1..20: mol_type = other RNA
gctggcatctcagatcccga

SEQ ID NO: 1485 - RNA, 20 nt, synthetic construct
  misc_feature 1..20: note = Synthetic
  source 1..20: mol_type = other RNA
aagtcatcagctattagtct

SEQ ID NO: 1486 - RNA, 20 nt, synthetic construct
  misc_feature 1..20: note = Synthetic
  source 1..20: mol_type = other RNA
caccaggggttcctcagtag

SEQ ID NO: 1487 - RNA, 20 nt, synthetic construct
  misc_feature 1..20: note = Synthetic
  source 1..20: mol_type = other RNA
cattcacatcatcttgcgaa

SEQ ID NO: 1488 - RNA, 20 nt, synthetic construct
  misc_feature 1..20: note = Synthetic
  source 1..20: mol_type = other RNA
cctttcctggcatgccgaag

SEQ ID NO: 1489 - RNA, 20 nt, synthetic construct
  misc_feature 1..20: note = Synthetic
  source 1..20: mol_type = other RNA
aaagtactacaacctcgaaa

SEQ ID NO: 1490 - RNA, 20 nt, synthetic construct
  misc_feature 1..20: note = Synthetic
  source 1..20: mol_type = other RNA
ctccaacaaggatcttgccc

SEQ ID NO: 1491 - RNA, 20 nt, synthetic construct
  misc_feature 1..20: note = Synthetic
  source 1..20: mol_type = other RNA
ctgcatatgaagttaacagc

SEQ ID NO: 1492 - RNA, 20 nt, synthetic construct
  misc_feature 1..20: note = Synthetic
  source 1..20: mol_type = other RNA
tgcctctactgaggaacccc

SEQ ID NO: 1493 - RNA, 20 nt, synthetic construct
  misc_feature 1..20: note = Synthetic
  source 1..20: mol_type = other RNA
tacctgggcaagatccttgt

SEQ ID NO: 1494 - RNA, 20 nt, synthetic construct
  misc_feature 1..20: note = Synthetic
  source 1..20: mol_type = other RNA
tcaaccttaggctcaactcc

SEQ ID NO: 1495 - RNA, 20 nt, synthetic construct
  misc_feature 1..20: note = Synthetic
  source 1..20: mol_type = other RNA
tctttgcagcggacaaatac

SEQ ID NO: 1496 - RNA, 20 nt, synthetic construct
  misc_feature 1..20: note = Synthetic
  source 1..20: mol_type = other RNA
tgggttttcctccaaccata

SEQ ID NO: 1497 - RNA, 20 nt, synthetic construct
  misc_feature 1..20: note = Synthetic
  source 1..20: mol_type = other RNA
catcttgcgaaaggcggaac

SEQ ID NO: 1498 - RNA, 20 nt, synthetic construct
  misc_feature 1..20: note = Synthetic
  source 1..20: mol_type = other RNA
cacacctgacatgaaccgtg

SEQ ID NO: 1499 - RNA, 20 nt, synthetic construct
  misc_feature 1..20: note = Synthetic
  source 1..20: mol_type = other RNA
ctctctgctgatgacatacg

SEQ ID NO: 1500 - RNA, 20 nt, synthetic construct
  misc_feature 1..20: note = Synthetic
  source 1..20: mol_type = other RNA
aagtaggtcctataaaaacg

SEQ ID NO: 1501 - RNA, 20 nt, synthetic construct
  misc_feature 1..20: note = Synthetic
  source 1..20: mol_type = other RNA
atgatgcacgcacctcgatg

SEQ ID NO: 1502 - RNA, 20 nt, synthetic construct
  misc_feature 1..20: note = Synthetic
  source 1..20: mol_type = other RNA
agtaggtcctataaaaacgt

SEQ ID NO: 1503 - RNA, 20 nt, synthetic construct
  misc_feature 1..20: note = Synthetic
  source 1..20: mol_type = other RNA
tcagtgttttggtgatacgt

SEQ ID NO: 1504 - RNA, 20 nt, synthetic construct
  misc_feature 1..20: note = Synthetic
  source 1..20: mol_type = other RNA
tgtcaggatttggcaagcgt

SEQ ID NO: 1505 - RNA, 20 nt, synthetic construct
  misc_feature 1..20: note = Synthetic
  source 1..20: mol_type = other RNA
cgtggcattcagtccctgta

SEQ ID NO: 1506 - RNA, 20 nt, synthetic construct
  misc_feature 1..20: note = Synthetic
  source 1..20: mol_type = other RNA
tggccattctagtgatccaa

SEQ ID NO: 1507 - RNA, 20 nt, synthetic construct
  misc_feature 1..20: note = Synthetic
  source 1..20: mol_type = other RNA
aggatgttgactacgcaatc

SEQ ID NO: 1508 - RNA, 20 nt, synthetic construct
  misc_feature 1..20: note = Synthetic
  source 1..20: mol_type = other RNA
acatcggggactccacatcg

SEQ ID NO: 1509 - RNA, 20 nt, synthetic construct
  misc_feature 1..20: note = Synthetic
  source 1..20: mol_type = other RNA
taatcagtttgggataacca

SEQ ID NO: 1510 - RNA, 20 nt, synthetic construct
  misc_feature 1..20: note = Synthetic
  source 1..20: mol_type = other RNA
gtggggaacattacggcctt

SEQ ID NO: 1511 - RNA, 20 nt, synthetic construct
  misc_feature 1..20: note = Synthetic
  source 1..20: mol_type = other RNA
catacaccaacgttacctgt

SEQ ID NO: 1512 - RNA, 20 nt, synthetic construct
  misc_feature 1..20: note = Synthetic
  source 1..20: mol_type = other RNA
tttgatgctgtcactaccgt

SEQ ID NO: 1513 - RNA, 20 nt, synthetic construct
  misc_feature 1..20: note = Synthetic
  source 1..20: mol_type = other RNA
ttggtggtttttgcccgtgg

SEQ ID NO: 1514 - RNA, 20 nt, synthetic construct
  misc_feature 1..20: note = Synthetic
  source 1..20: mol_type = other RNA
tgccaggggggcccgtatgg

SEQ ID NO: 1515 - RNA, 20 nt, synthetic construct
  misc_feature 1..20: note = Synthetic
  source 1..20: mol_type = other RNA
ccctgaaatgatggacatcg

SEQ ID NO: 1516 - RNA, 20 nt, synthetic construct
  misc_feature 1..20: note = Synthetic
  source 1..20: mol_type = other RNA
gcaactggacacatctaccc

SEQ ID NO: 1517 - RNA, 20 nt, synthetic construct
  misc_feature 1..20: note = Synthetic
  source 1..20: mol_type = other RNA
gaggtgcgtgcatcatctcc

SEQ ID NO: 1518 - RNA, 20 nt, synthetic construct
  misc_feature 1..20: note = Synthetic
  source 1..20: mol_type = other RNA
gtaatcagtttgggataacc

SEQ ID NO: 1519 - RNA, 20 nt, synthetic construct
  misc_feature 1..20: note = Synthetic
  source 1..20: mol_type = other RNA
ttttgatgctgtcactaccg

SEQ ID NO: 1520 - RNA, 20 nt, synthetic construct
  misc_feature 1..20: note = Synthetic
  source 1..20: mol_type = other RNA
cggcctttggatcactagaa

SEQ ID NO: 1521 - RNA, 20 nt, synthetic construct
  misc_feature 1..20: note = Synthetic
  source 1..20: mol_type = other RNA
actagaatggccaagaccta

SEQ ID NO: 1522 - RNA, 20 nt, synthetic construct
  misc_feature 1..20: note = Synthetic
  source 1..20: mol_type = other RNA
atttcgatgaggacgaattc

SEQ ID NO: 1523 - RNA, 20 nt, synthetic construct
  misc_feature 1..20: note = Synthetic
  source 1..20: mol_type = other RNA
gggtaacattactccatact

SEQ ID NO: 1524 - RNA, 20 nt, synthetic construct
  misc_feature 1..20: note = Synthetic
  source 1..20: mol_type = other RNA
aggggatgcacatttcgatg

SEQ ID NO: 1525 - RNA, 20 nt, synthetic construct
  misc_feature 1..20: note = Synthetic
  source 1..20: mol_type = other RNA
ttgcgtagtcaacatcctca

SEQ ID NO: 1526 - RNA, 20 nt, synthetic construct
  misc_feature 1..20: note = Synthetic
  source 1..20: mol_type = other RNA
acatcctcacggttcatgtc

SEQ ID NO: 1527 - RNA, 20 nt, synthetic construct
  misc_feature 1..20: note = Synthetic
  source 1..20: mol_type = other RNA
aaatgccaggggggcccgta

SEQ ID NO: 1528 - RNA, 20 nt, synthetic construct
  misc_feature 1..20: note = Synthetic
  source 1..20: mol_type = other RNA
cccgattccttggaagttct

SEQ ID NO: 1529 - RNA, 20 nt, synthetic construct
  misc_feature 1..20: note = Synthetic
  source 1..20: mol_type = other RNA
ttatggccaaccttgccatc

SEQ ID NO: 1530 - RNA, 20 nt, synthetic construct
  misc_feature 1..20: note = Synthetic
  source 1..20: mol_type = other RNA
ctcactgctgttcacgagat

SEQ ID NO: 1531 - RNA, 20 nt, synthetic construct
  misc_feature 1..20: note = Synthetic
  source 1..20: mol_type = other RNA
ccccgatgtccatcatttca

SEQ ID NO: 1532 - RNA, 20 nt, synthetic construct
  misc_feature 1..20: note = Synthetic
  source 1..20: mol_type = other RNA
aagaattcaactcaccatac

SEQ ID NO: 1533 - RNA, 20 nt, synthetic construct
  misc_feature 1..20: note = Synthetic
  source 1..20: mol_type = other RNA
cctgaacagctctacaagcc

SEQ ID NO: 1534 - RNA, 20 nt, synthetic construct
  misc_feature 1..20: note = Synthetic
  source 1..20: mol_type = other RNA
ttttggtgatacgttggagt

SEQ ID NO: 1535 - RNA, 20 nt, synthetic construct
  misc_feature 1..20: note = Synthetic
  source 1..20: mol_type = other RNA
caattttaggcccgattcct

SEQ ID NO: 1536 - RNA, 20 nt, synthetic construct
  misc_feature 1..20: note = Synthetic
  source 1..20: mol_type = other RNA
cacgagattggccattcctt

SEQ ID NO: 1537 - RNA, 20 nt, synthetic construct
  misc_feature 1..20: note = Synthetic
  source 1..20: mol_type = other RNA
tccccgatgtccatcatttc

SEQ ID NO: 1538 - RNA, 20 nt, synthetic construct
  misc_feature 1..20: note = Synthetic
  source 1..20: mol_type = other RNA
ggcaagcgttggttctcttt

SEQ ID NO: 1539 - RNA, 20 nt, synthetic construct
  misc_feature 1..20: note = Synthetic
  source 1..20: mol_type = other RNA
gcaagcgttggttctctttt

SEQ ID NO: 1540 - RNA, 20 nt, synthetic construct
  misc_feature 1..20: note = Synthetic
  source 1..20: mol_type = other RNA
ctagcccatgcttttggacc

SEQ ID NO: 1541 - RNA, 20 nt, synthetic construct
  misc_feature 1..20: note = Synthetic
  source 1..20: mol_type = other RNA
tggtttttgcccgtggaggt

SEQ ID NO: 1542 - RNA, 20 nt, synthetic construct
  misc_feature 1..20: note = Synthetic
  source 1..20: mol_type = other RNA
aattttaccagacttcacga

SEQ ID NO: 1543 - RNA, 20 nt, synthetic construct
  misc_feature 1..20: note = Synthetic
  source 1..20: mol_type = other RNA
gatgccattaccagtctccg

SEQ ID NO: 1544 - RNA, 20 nt, synthetic construct
  misc_feature 1..20: note = Synthetic
  source 1..20: mol_type = other RNA
cttaggtcttgaccactcca

SEQ ID NO: 1545 - RNA, 20 nt, synthetic construct
  misc_feature 1..20: note = Synthetic
  source 1..20: mol_type = other RNA
ctaccatcctacaaatctcg

SEQ ID NO: 1546 - RNA, 20 nt, synthetic construct
  misc_feature 1..20: note = Synthetic
  source 1..20: mol_type = other RNA
ttcttcggcttagaggtgac

SEQ ID NO: 1547 - RNA, 20 nt, synthetic construct
  misc_feature 1..20: note = Synthetic
  source 1..20: mol_type = other RNA
ctggcatgacgcgaacaata

SEQ ID NO: 1548 - RNA, 20 nt, synthetic construct
  misc_feature 1..20: note = Synthetic
  source 1..20: mol_type = other RNA
tggaccatttaagagttcga

SEQ ID NO: 1549 - RNA, 20 nt, synthetic construct
  misc_feature 1..20: note = Synthetic
  source 1..20: mol_type = other RNA
taggatggtagtatgatctc

SEQ ID NO: 1550 - RNA, 20 nt, synthetic construct
  misc_feature 1..20: note = Synthetic
  source 1..20: mol_type = other RNA
ttcccgcgagatttgtagga

SEQ ID NO: 1551 - RNA, 20 nt, synthetic construct
  misc_feature 1..20: note = Synthetic
  source 1..20: mol_type = other RNA
tatgcagcatcaatacggtt

SEQ ID NO: 1552 - RNA, 20 nt, synthetic construct
  misc_feature 1..20: note = Synthetic
  source 1..20: mol_type = other RNA
taccatcctacaaatctcgc

SEQ ID NO: 1553 - RNA, 20 nt, synthetic construct
  misc_feature 1..20: note = Synthetic
  source 1..20: mol_type = other RNA
ccgagttaccatagagagac

SEQ ID NO: 1554 - RNA, 20 nt, synthetic construct
  misc_feature 1..20: note = Synthetic
  source 1..20: mol_type = other RNA
ggccagagggcccatcaaat

SEQ ID NO: 1555 - RNA, 20 nt, synthetic construct
  misc_feature 1..20: note = Synthetic
  source 1..20: mol_type = other RNA
ttctcggagcctctcagtca

SEQ ID NO: 1556 - RNA, 20 nt, synthetic construct
  misc_feature 1..20: note = Synthetic
  source 1..20: mol_type = other RNA
cttgttgctgcgcatgagtt

SEQ ID NO: 1557 - RNA, 20 nt, synthetic construct
  misc_feature 1..20: note = Synthetic
  source 1..20: mol_type = other RNA
acctggacaagtagttccaa

SEQ ID NO: 1558 - RNA, 20 nt, synthetic construct
  misc_feature 1..20: note = Synthetic
  source 1..20: mol_type = other RNA
aaagtggcttttgccggtgt

SEQ ID NO: 1559 - RNA, 20 nt, synthetic construct
  misc_feature 1..20: note = Synthetic
  source 1..20: mol_type = other RNA
gcgacttctacccatttgat

SEQ ID NO: 1560 - RNA, 20 nt, synthetic construct
  misc_feature 1..20: note = Synthetic
  source 1..20: mol_type = other RNA
cctcctgggccaaattatgg

SEQ ID NO: 1561 - RNA, 20 nt, synthetic construct
  misc_feature 1..20: note = Synthetic
  source 1..20: mol_type = other RNA
agcaatgccatcgtgaagtc

SEQ ID NO: 1562 - RNA, 20 nt, synthetic construct
  misc_feature 1..20: note = Synthetic
  source 1..20: mol_type = other RNA
atatgcagcatcaatacggt

SEQ ID NO: 1563 - RNA, 20 nt, synthetic construct
  misc_feature 1..20: note = Synthetic
  source 1..20: mol_type = other RNA
acatcaggaaccccgcatct

SEQ ID NO: 1564 - RNA, 20 nt, synthetic construct
  misc_feature 1..20: note = Synthetic
  source 1..20: mol_type = other RNA
aggattcccgcgagatttgt

SEQ ID NO: 1565 - RNA, 20 nt, synthetic construct
  misc_feature 1..20: note = Synthetic
  source 1..20: mol_type = other RNA
tttcctatctacacctacac

SEQ ID NO: 1566 - RNA, 20 nt, synthetic construct
  misc_feature 1..20: note = Synthetic
  source 1..20: mol_type = other RNA
gatactctacctctgcaaac

SEQ ID NO: 1567 - RNA, 20 nt, synthetic construct
  misc_feature 1..20: note = Synthetic
  source 1..20: mol_type = other RNA
cttggagtggtcaagaccta

SEQ ID NO: 1568 - RNA, 20 nt, synthetic construct
  misc_feature 1..20: note = Synthetic
  source 1..20: mol_type = other RNA
aaatctcgcgggaatcctga

SEQ ID NO: 1569 - RNA, 20 nt, synthetic construct
  misc_feature 1..20: note = Synthetic
  source 1..20: mol_type = other RNA
actgcttctcgacatctccg

SEQ ID NO: 1570 - RNA, 20 nt, synthetic construct
  misc_feature 1..20: note = Synthetic
  source 1..20: mol_type = other RNA
gtttcctaccagcccgacca

SEQ ID NO: 1571 - RNA, 20 nt, synthetic construct
  misc_feature 1..20: note = Synthetic
  source 1..20: mol_type = other RNA
agtgaaggatgcttccgtca

SEQ ID NO: 1572 - RNA, 20 nt, synthetic construct
  misc_feature 1..20: note = Synthetic
  source 1..20: mol_type = other RNA
cgaccgctgacaggtgtctg

SEQ ID NO: 1573 - RNA, 20 nt, synthetic construct
  misc_feature 1..20: note = Synthetic
  source 1..20: mol_type = other RNA
ttgatttcatcactgcagcg

SEQ ID NO: 1574 - RNA, 20 nt, synthetic construct
  misc_feature 1..20: note = Synthetic
  source 1..20: mol_type = other RNA
gtaggcacaggtcatcacag

SEQ ID NO: 1575 - RNA, 20 nt, synthetic construct
  misc_feature 1..20: note = Synthetic
  source 1..20: mol_type = other RNA
cagtgaaggatgcttccgtc

SEQ ID NO: 1576 - RNA, 20 nt, synthetic construct
  misc_feature 1..20: note = Synthetic
  source 1..20: mol_type = other RNA
gctgaggtggatcacagtga

SEQ ID NO: 1577 - RNA, 20 nt, synthetic construct
  misc_feature 1..20: note = Synthetic
  source 1..20: mol_type = other RNA
ctactgctgagcatcttgga

SEQ ID NO: 1578 - RNA, 20 nt, synthetic construct
  misc_feature 1..20: note = Synthetic
  source 1..20: mol_type = other RNA
ccgccccagacacctgtcag

SEQ ID NO: 1579 - RNA, 20 nt, synthetic construct
  misc_feature 1..20: note = Synthetic
  source 1..20: mol_type = other RNA
agactgcttctcgacatctc

SEQ ID NO: 1580 - RNA, 20 nt, synthetic construct
  misc_feature 1..20: note = Synthetic
  source 1..20: mol_type = other RNA
tcagcatgctcaggcctgca

SEQ ID NO: 1581 - RNA, 20 nt, synthetic construct
  misc_feature 1..20: note = Synthetic
  source 1..20: mol_type = other RNA
gagcatggatccaaccaccc

SEQ ID NO: 1582 - RNA, 20 nt, synthetic construct
  misc_feature 1..20: note = Synthetic
  source 1..20: mol_type = other RNA
gactgcttctcgacatctcc

SEQ ID NO: 1583 - RNA, 20 nt, synthetic construct
  misc_feature 1..20: note = Synthetic
  source 1..20: mol_type = other RNA
acatctccggggtgccctga

SEQ ID NO: 1584 - RNA, 20 nt, synthetic construct
  misc_feature 1..20: note = Synthetic
  source 1..20: mol_type = other RNA
cctaatattatggatctgga

SEQ ID NO: 1585 - RNA, 20 nt, synthetic construct
  misc_feature 1..20: note = Synthetic
  source 1..20: mol_type = other RNA
cggcggcagcgataccagat

SEQ ID NO: 1586 - RNA, 20 nt, synthetic construct
  misc_feature 1..20: note = Synthetic
  source 1..20: mol_type = other RNA
gacccaaatcccgttgacag

SEQ ID NO: 1587 - RNA, 20 nt, synthetic construct
  misc_feature 1..20: note = Synthetic
  source 1..20: mol_type = other RNA
gatctggacttcgaggtcgg

SEQ ID NO: 1588 - RNA, 20 nt, synthetic construct
  misc_feature 1..20: note = Synthetic
  source 1..20: mol_type = other RNA
tgggtgctaaacagcacacg

SEQ ID NO: 1589 - RNA, 20 nt, synthetic construct
  misc_feature 1..20: note = Synthetic
  source 1..20: mol_type = other RNA
cgatagctgcacgcgtggcg

SEQ ID NO: 1590 - RNA, 20 nt, synthetic construct
  misc_feature 1..20: note = Synthetic
  source 1..20: mol_type = other RNA
gcgatagctgcacgcgtggc

SEQ ID NO: 1591 - RNA, 20 nt, synthetic construct
  misc_feature 1..20: note = Synthetic
  source 1..20: mol_type = other RNA
agcggcgatagctgcacgcg

SEQ ID NO: 1592 - RNA, 20 nt, synthetic construct
  misc_feature 1..20: note = Synthetic
  source 1..20: mol_type = other RNA
gcggtttatccggatagata

SEQ ID NO: 1593 - RNA, 20 nt, synthetic construct
  misc_feature 1..20: note = Synthetic
  source 1..20: mol_type = other RNA
cttgacaaaggtgtgagtcg

SEQ ID NO: 1594 - RNA, 20 nt, synthetic construct
  misc_feature 1..20: note = Synthetic
  source 1..20: mol_type = other RNA
gccccggcacccgctgtcaa

SEQ ID NO: 1595 - RNA, 20 nt, synthetic construct
  misc_feature 1..20: note = Synthetic
  source 1..20: mol_type = other RNA
acaccgagaattcgcccctg

SEQ ID NO: 1596 - RNA, 20 nt, synthetic construct
  misc_feature 1..20: note = Synthetic
  source 1..20: mol_type = other RNA
ggcgatagctgcacgcgtgg

SEQ ID NO: 1597 - RNA, 20 nt, synthetic construct
  misc_feature 1..20: note = Synthetic
  source 1..20: mol_type = other RNA
ttttctgatcggcatacagg

SEQ ID NO: 1598 - RNA, 20 nt, synthetic construct
  misc_feature 1..20: note = Synthetic
  source 1..20: mol_type = other RNA
atctatccggataaaccgcc

SEQ ID NO: 1599 - RNA, 20 nt, synthetic construct
  misc_feature 1..20: note = Synthetic
  source 1..20: mol_type = other RNA
ctttgtcaaggcgctgacca

SEQ ID NO: 1600 - RNA, 20 nt, synthetic construct
  misc_feature 1..20: note = Synthetic
  source 1..20: mol_type = other RNA
gtgtgacagtgtcagcgtgt

SEQ ID NO: 1601 - RNA, 20 nt, synthetic construct
  misc_feature 1..20: note = Synthetic
  source 1..20: mol_type = other RNA
taaacagcacacggggtgaa

SEQ ID NO: 1602 - RNA, 20 nt, synthetic construct
  misc_feature 1..20: note = Synthetic
  source 1..20: mol_type = other RNA
gcagacccgcaacattactg

SEQ ID NO: 1603 - RNA, 20 nt, synthetic construct
  misc_feature 1..20: note = Synthetic
  source 1..20: mol_type = other RNA
acacacaggccgtatctatc

SEQ ID NO: 1604 - RNA, 20 nt, synthetic construct
  misc_feature 1..20: note = Synthetic
  source 1..20: mol_type = other RNA
catggtcagcgccttgacaa

SEQ ID NO: 1605 - RNA, 20 nt, synthetic construct
  misc_feature 1..20: note = Synthetic
  source 1..20: mol_type = other RNA
cccgttgacagcgggtgccg

SEQ ID NO: 1606 - RNA, 20 nt, synthetic construct
  misc_feature 1..20: note = Synthetic
  source 1..20: mol_type = other RNA
gcaacattactgtggacccc

SEQ ID NO: 1607 - RNA, 20 nt, synthetic construct
  misc_feature 1..20: note = Synthetic
  source 1..20: mol_type = other RNA
atgctgaagtttagtccagt

SEQ ID NO: 1608 - RNA, 20 nt, synthetic construct
  misc_feature 1..20: note = Synthetic
  source 1..20: mol_type = other RNA
tgtcaacgggatttgggtcc

SEQ ID NO: 1609 - RNA, 20 nt, synthetic construct
  misc_feature 1..20: note = Synthetic
  source 1..20: mol_type = other RNA
gccgctttttaaacagcctg

SEQ ID NO: 1610 - RNA, 20 nt, synthetic construct
  misc_feature 1..20: note = Synthetic
  source 1..20: mol_type = other RNA
agcttttctgatcggcatac

SEQ ID NO: 1611 - RNA, 20 nt, synthetic construct
  misc_feature 1..20: note = Synthetic
  source 1..20: mol_type = other RNA
acccaaatcccgttgacagc

SEQ ID NO: 1612 - RNA, 20 nt, synthetic construct
  misc_feature 1..20: note = Synthetic
  source 1..20: mol_type = other RNA
gggatttgggtcccggcact

SEQ ID NO: 1613 - RNA, 20 nt, synthetic construct
  misc_feature 1..20: note = Synthetic
  source 1..20: mol_type = other RNA
caggatctggacttcgaggt

SEQ ID NO: 1614 - RNA, 20 nt, synthetic construct
  misc_feature 1..20: note = Synthetic
  source 1..20: mol_type = other RNA
gtgcagctatcgccgctgcc

SEQ ID NO: 1615 - RNA, 20 nt, synthetic construct
  misc_feature 1..20: note = Synthetic
  source 1..20: mol_type = other RNA
ggggcattgactcaaagcac

SEQ ID NO: 1616 - RNA, 20 nt, synthetic construct
  misc_feature 1..20: note = Synthetic
  source 1..20: mol_type = other RNA
acccgctgtcaacgggattt

SEQ ID NO: 1617 - RNA, 20 nt, synthetic construct
  misc_feature 1..20: note = Synthetic
  source 1..20: mol_type = other RNA
aattcgcccctgtggaagat

SEQ ID NO: 1618 - RNA, 20 nt, synthetic construct
  misc_feature 1..20: note = Synthetic
  source 1..20: mol_type = other RNA
tcgccgctttttaaacagcc

SEQ ID NO: 1619 - RNA, 20 nt, synthetic construct
  misc_feature 1..20: note = Synthetic
  source 1..20: mol_type = other RNA
tcccgttgacagcgggtgcc

SEQ ID NO: 1620 - RNA, 20 nt, synthetic construct
  misc_feature 1..20: note = Synthetic
  source 1..20: mol_type = other RNA
ccccggcacccgctgtcaac

SEQ ID NO: 1621 - RNA, 20 nt, synthetic construct
  misc_feature 1..20: note = Synthetic
  source 1..20: mol_type = other RNA
gtggtgctgcccccttcaac

SEQ ID NO: 1622 - RNA, 20 nt, synthetic construct
  misc_feature 1..20: note = Synthetic
  source 1..20: mol_type = other RNA
atcccgttgacagcgggtgc

SEQ ID NO: 1623 - RNA, 20 nt, synthetic construct
  misc_feature 1..20: note = Synthetic
  source 1..20: mol_type = other RNA
cacccgctgtcaacgggatt

SEQ ID NO: 1624 - RNA, 20 nt, synthetic construct
  misc_feature 1..20: note = Synthetic
  source 1..20: mol_type = other RNA
cttccacaggggcgaattct

SEQ ID NO: 1625 - RNA, 20 nt, synthetic construct
  misc_feature 1..20: note = Synthetic
  source 1..20: mol_type = other RNA
aggctgcctggcggtttatc

SEQ ID NO: 1626 - RNA, 20 nt, synthetic construct
  misc_feature 1..20: note = Synthetic
  source 1..20: mol_type = other RNA
tgcagctatcgccgctgccg

SEQ ID NO: 1627 - RNA, 20 nt, synthetic construct
  misc_feature 1..20: note = Synthetic
  source 1..20: mol_type = other RNA
cgtgcagctatcgccgctgc

SEQ ID NO: 1628 - RNA, 20 nt, synthetic construct
  misc_feature 1..20: note = Synthetic
  source 1..20: mol_type = other RNA
cgccgctttttaaacagcct

SEQ ID NO: 1629 - RNA, 20 nt, synthetic construct
  misc_feature 1..20: note = Synthetic
  source 1..20: mol_type = other RNA
tgagacgactgggcgctgcg

SEQ ID NO: 1630 - RNA, 20 nt, synthetic construct
  misc_feature 1..20: note = Synthetic
  source 1..20: mol_type = other RNA
gagcatgtcggcgccgtgcg

SEQ ID NO: 1631 - RNA, 20 nt, synthetic construct
  misc_feature 1..20: note = Synthetic
  source 1..20: mol_type = other RNA
ttgcaagcagggcgcgaacg

SEQ ID NO: 1632 - RNA, 20 nt, synthetic construct
  misc_feature 1..20: note = Synthetic
  source 1..20: mol_type = other RNA
gtgtcctcgcacacggtgca

SEQ ID NO: 1633 - RNA, 20 nt, synthetic construct
  misc_feature 1..20: note = Synthetic
  source 1..20: mol_type = other RNA
caagcagaacaccgtgtgcg

SEQ ID NO: 1634 - RNA, 20 nt, synthetic construct
  misc_feature 1..20: note = Synthetic
  source 1..20: mol_type = other RNA
agacctcatagccagcacgg

SEQ ID NO: 1635 - RNA, 20 nt, synthetic construct
  misc_feature 1..20: note = Synthetic
  source 1..20: mol_type = other RNA
tcgctggatgcggcgcaggg

SEQ ID NO: 1636 - RNA, 20 nt, synthetic construct
  misc_feature 1..20: note = Synthetic
  source 1..20: mol_type = other RNA
agcttctcaacggctctgcg

SEQ ID NO: 1637 - RNA, 20 nt, synthetic construct
  misc_feature 1..20: note = Synthetic
  source 1..20: mol_type = other RNA
acggtctggttggctccaca

SEQ ID NO: 1638 - RNA, 20 nt, synthetic construct
  misc_feature 1..20: note = Synthetic
  source 1..20: mol_type = other RNA
aggcgtgacgttctccgacg

SEQ ID NO: 1639 - RNA, 20 nt, synthetic construct
  misc_feature 1..20: note = Synthetic
  source 1..20: mol_type = other RNA
caagccgtgcaccgagtgcg

SEQ ID NO: 1640 - RNA, 20 nt, synthetic construct
  misc_feature 1..20: note = Synthetic
  source 1..20: mol_type = other RNA
gcgtcgtcggcctccacgca

SEQ ID NO: 1641 - RNA, 20 nt, synthetic construct
  misc_feature 1..20: note = Synthetic
  source 1..20: mol_type = other RNA
catgtcggcgccgtgcgtgg

SEQ ID NO: 1642 - RNA, 20 nt, synthetic construct
  misc_feature 1..20: note = Synthetic
  source 1..20: mol_type = other RNA
cgaggcgtgccgcgtgtgcg

SEQ ID NO: 1643 - RNA, 20 nt, synthetic construct
  misc_feature 1..20: note = Synthetic
  source 1..20: mol_type = other RNA
cgacggcacgtattccgacg

SEQ ID NO: 1644 - RNA, 20 nt, synthetic construct
  misc_feature 1..20: note = Synthetic
  source 1..20: mol_type = other RNA
tcccagcccgtggtgacccg

SEQ ID NO: 1645 - RNA, 20 nt, synthetic construct
  misc_feature 1..20: note = Synthetic
  source 1..20: mol_type = other RNA
gacagggatgaggttgtcgg

SEQ ID NO: 1646 - RNA, 20 nt, synthetic construct
  misc_feature 1..20: note = Synthetic
  source 1..20: mol_type = other RNA
gcttctcaacggctctgcgg

SEQ ID NO: 1647 - RNA, 20 nt, synthetic construct
  misc_feature 1..20: note = Synthetic
  source 1..20: mol_type = other RNA
ccccggttgggctcacaccg

SEQ ID NO: 1648 - RNA, 20 nt, synthetic construct
  misc_feature 1..20: note = Synthetic
  source 1..20: mol_type = other RNA
ggcgcggcccgtccatggcg

SEQ ID NO: 1649 - RNA, 20 nt, synthetic construct
  misc_feature 1..20: note = Synthetic
  source 1..20: mol_type = other RNA
cagcaggcgcggcccgtcca

SEQ ID NO: 1650 - RNA, 20 nt, synthetic construct
  misc_feature 1..20: note = Synthetic
  source 1..20: mol_type = other RNA
gccaccggccgcgccatgga

SEQ ID NO: 1651 - RNA, 20 nt, synthetic construct
  misc_feature 1..20: note = Synthetic
  source 1..20: mol_type = other RNA
ctcggtcgcgctcaccacgt

SEQ ID NO: 1652 - RNA, 20 nt, synthetic construct
  misc_feature 1..20: note = Synthetic
  source 1..20: mol_type = other RNA
agccccacgcactcggtgca

SEQ ID NO: 1653 - RNA, 20 nt, synthetic construct
  misc_feature 1..20: note = Synthetic
  source 1..20: mol_type = other RNA
agccgtgcaccgagtgcgtg

SEQ ID NO: 1654 - RNA, 20 nt, synthetic construct
  misc_feature 1..20: note = Synthetic
  source 1..20: mol_type = other RNA
gccgtaggcgcagcggcaca

SEQ ID NO: 1655 - RNA, 20 nt, synthetic construct
  misc_feature 1..20: note = Synthetic
  source 1..20: mol_type = other RNA
ctgcgcctacggctactacc

SEQ ID NO: 1656 - RNA, 20 nt, synthetic construct
  misc_feature 1..20: note = Synthetic
  source 1..20: mol_type = other RNA
cgtcggaatacgtgccgtcg

SEQ ID NO: 1657 - RNA, 20 nt, synthetic construct
  misc_feature 1..20: note = Synthetic
  source 1..20: mol_type = other RNA
ctcgtcggaatacgtgccgt

SEQ ID NO: 1658 - RNA, 20 nt, synthetic construct
  misc_feature 1..20: note = Synthetic
  source 1..20: mol_type = other RNA
gcgctcggtgtcctcgcaca

SEQ ID NO: 1659 - RNA, 20 nt, synthetic construct
  misc_feature 1..20: note = Synthetic
  source 1..20: mol_type = other RNA
cgaggtcggctcgctggatg

SEQ ID NO: 1660 - RNA, 20 nt, synthetic construct
  misc_feature 1..20: note = Synthetic
  source 1..20: mol_type = other RNA
catccagcgagccgacctcg

SEQ ID NO: 1661 - RNA, 20 nt, synthetic construct
  misc_feature 1..20: note = Synthetic
  source 1..20: mol_type = other RNA
ggtgcacggcttgcacggct

SEQ ID NO: 1662 - RNA, 20 nt, synthetic construct
  misc_feature 1..20: note = Synthetic
  source 1..20: mol_type = other RNA
aagccgtgcaccgagtgcgt

SEQ ID NO: 1663 - RNA, 20 nt, synthetic construct
  misc_feature 1..20: note = Synthetic
  source 1..20: mol_type = other RNA
gtcggggcactcctcgcaca

SEQ ID NO: 1664 - RNA, 20 nt, synthetic construct
  misc_feature 1..20: note = Synthetic
  source 1..20: mol_type = other RNA
gtgtggaccgtgtaatccaa

SEQ ID NO: 1665 - RNA, 20 nt, synthetic construct
  misc_feature 1..20: note = Synthetic
  source 1..20: mol_type = other RNA
gcttgcaagcagggcgcgaa

SEQ ID NO: 1666 - RNA, 20 nt, synthetic construct
  misc_feature 1..20: note = Synthetic
  source 1..20: mol_type = other RNA
gggtggcccagcttgcaagc

SEQ ID NO: 1667 - RNA, 20 nt, synthetic construct
  misc_feature 1..20: note = Synthetic
  source 1..20: mol_type = other RNA
gggctcacacacggtctggt

SEQ ID NO: 1668 - RNA, 20 nt, synthetic construct
  misc_feature 1..20: note = Synthetic
  source 1..20: mol_type = other RNA
ggtagtagccgtaggcgcag

SEQ ID NO: 1669 - RNA, 20 nt, synthetic construct
  misc_feature 1..20: note = Synthetic
  source 1..20: mol_type = other RNA
gtgtgcgaggagtgccccga

SEQ ID NO: 1670 - RNA, 20 nt, synthetic construct
  misc_feature 1..20: note = Synthetic
  source 1..20: mol_type = other RNA
accgtgtaatccaacggcca

SEQ ID NO: 1671 - RNA, 20 nt, synthetic construct
  misc_feature 1..20: note = Synthetic
  source 1..20: mol_type = other RNA
gcagccctcaagggtgacgg

SEQ ID NO: 1672 - RNA, 20 nt, synthetic construct
  misc_feature 1..20: note = Synthetic
  source 1..20: mol_type = other RNA
ggtggcccagcttgcaagca

SEQ ID NO: 1673 - RNA, 20 nt, synthetic construct
  misc_feature 1..20: note = Synthetic
  source 1..20: mol_type = other RNA
ggctcgctggatgcggcgca

SEQ ID NO: 1674 - RNA, 20 nt, synthetic construct
  misc_feature 1..20: note = Synthetic
  source 1..20: mol_type = other RNA
tctccacgaggtcggctcgc

SEQ ID NO: 1675 - RNA, 20 nt, synthetic construct
  misc_feature 1..20: note = Synthetic
  source 1..20: mol_type = other RNA
ccgagcccgcctcgcacacg

SEQ ID NO: 1676 - RNA, 20 nt, synthetic construct
  misc_feature 1..20: note = Synthetic
  source 1..20: mol_type = other RNA
ggcgtgccgcgtgtgcgagg

SEQ ID NO: 1677 - RNA, 20 nt, synthetic construct
  misc_feature 1..20: note = Synthetic
  source 1..20: mol_type = other RNA
atcacggcggaaacggtacg

SEQ ID NO: 1678 - RNA, 20 nt, synthetic construct
  misc_feature 1..20: note = Synthetic
  source 1..20: mol_type = other RNA
tggcgaacagaacatcacgg

SEQ ID NO: 1679 - RNA, 20 nt, synthetic construct
  misc_feature 1..20: note = Synthetic
  source 1..20: mol_type = other RNA
tcatcggccatcgacattcg

SEQ ID NO: 1680 - RNA, 20 nt, synthetic construct
  misc_feature 1..20: note = Synthetic
  source 1..20: mol_type = other RNA
agagacgctacaactcaccg

SEQ ID NO: 1681 - RNA, 20 nt, synthetic construct
  misc_feature 1..20: note = Synthetic
  source 1..20: mol_type = other RNA
gcggagcataagagtcaccg

SEQ ID NO: 1682 - RNA, 20 nt, synthetic construct
  misc_feature 1..20: note = Synthetic
  source 1..20: mol_type = other RNA
gagacgctacaactcaccgc

SEQ ID NO: 1683 - RNA, 20 nt, synthetic construct
  misc_feature 1..20: note = Synthetic
  source 1..20: mol_type = other RNA
cacataccgagtactcccct

SEQ ID NO: 1684 - RNA, 20 nt, synthetic construct
  misc_feature 1..20: note = Synthetic
  source 1..20: mol_type = other RNA
ggagcataagagtcaccgag

SEQ ID NO: 1685 - RNA, 20 nt, synthetic construct
  misc_feature 1..20: note = Synthetic
  source 1..20: mol_type = other RNA
cggagcataagagtcaccga

SEQ ID NO: 1686 - RNA, 20 nt, synthetic construct
  misc_feature 1..20: note = Synthetic
  source 1..20: mol_type = other RNA
tgaagtcagtgctcggacgt

SEQ ID NO: 1687 - RNA, 20 nt, synthetic construct
  misc_feature 1..20: note = Synthetic
  source 1..20: mol_type = other RNA
tcggtgtccattgcaatcac

SEQ ID NO: 1688 - RNA, 20 nt, synthetic construct
  misc_feature 1..20: note = Synthetic
  source 1..20: mol_type = other RNA
cccgcccttgtatctcatgg

SEQ ID NO: 1689 - RNA, 20 nt, synthetic construct
  misc_feature 1..20: note = Synthetic
  source 1..20: mol_type = other RNA
atgttctgttcgccaccacg

SEQ ID NO: 1690 - RNA, 20 nt, synthetic construct
  misc_feature 1..20: note = Synthetic
  source 1..20: mol_type = other RNA
ggattacgtgggcagccccg

SEQ ID NO: 1691 - RNA, 20 nt, synthetic construct
  misc_feature 1..20: note = Synthetic
  source 1..20: mol_type = other RNA
gaagccaggccggtcaaaaa

SEQ ID NO: 1692 - RNA, 20 nt, synthetic construct
  misc_feature 1..20: note = Synthetic
  source 1..20: mol_type = other RNA
gccggtcaaaaacggttgca

SEQ ID NO: 1693 - RNA, 20 nt, synthetic construct
  misc_feature 1..20: note = Synthetic
  source 1..20: mol_type = other RNA
acaataaactcgtgggctgg

SEQ ID NO: 1694 - RNA, 20 nt, synthetic construct
  misc_feature 1..20: note = Synthetic
  source 1..20: mol_type = other RNA
gtatctcatggaggattacg

SEQ ID NO: 1695 - RNA, 20 nt, synthetic construct
  misc_feature 1..20: note = Synthetic
  source 1..20: mol_type = other RNA
atatttctcgcttatctccg

SEQ ID NO: 1696 - RNA, 20 nt, synthetic construct
  misc_feature 1..20: note = Synthetic
  source 1..20: mol_type = other RNA
gtaatcctccatgagataca

SEQ ID NO: 1697 - RNA, 20 nt, synthetic construct
  misc_feature 1..20: note = Synthetic
  source 1..20: mol_type = other RNA
ttacgtgggcagccccgtgg

SEQ ID NO: 1698 - RNA, 20 nt, synthetic construct
  misc_feature 1..20: note = Synthetic
  source 1..20: mol_type = other RNA
gtgggtgaccgacaagtcat

SEQ ID NO: 1699 - RNA, 20 nt, synthetic construct
  misc_feature 1..20: note = Synthetic
  source 1..20: mol_type = other RNA
ctggtgtccccgaatgtcga

SEQ ID NO: 1700 - RNA, 20 nt, synthetic construct
  misc_feature 1..20: note = Synthetic
  source 1..20: mol_type = other RNA
catcgacattcggggacacc

SEQ ID NO: 1701 - RNA, 20 nt, synthetic construct
  misc_feature 1..20: note = Synthetic
  source 1..20: mol_type = other RNA
tttttatgaaacgcgatgta

SEQ ID NO: 1702 - RNA, 20 nt, synthetic construct
  misc_feature 1..20: note = Synthetic
  source 1..20: mol_type = other RNA
gcaaccgtttttgaccggcc

SEQ ID NO: 1703 - RNA, 20 nt, synthetic construct
  misc_feature 1..20: note = Synthetic
  source 1..20: mol_type = other RNA
ggggtattgatgataaacac

SEQ ID NO: 1704 - RNA, 20 nt, synthetic construct
  misc_feature 1..20: note = Synthetic
  source 1..20: mol_type = other RNA
cagtgctcggacgtaggttt

SEQ ID NO: 1705 - RNA, 20 nt, synthetic construct
  misc_feature 1..20: note = Synthetic
  source 1..20: mol_type = other RNA
tcagtgctcggacgtaggtt

SEQ ID NO: 1706 - RNA, 20 nt, synthetic construct
  misc_feature 1..20: note = Synthetic
  source 1..20: mol_type = other RNA
tctcgacaaggcacacacac

SEQ ID NO: 1707 - RNA, 20 nt, synthetic construct
  misc_feature 1..20: note = Synthetic
  source 1..20: mol_type = other RNA
attccagccggtgattgcaa

SEQ ID NO: 1708 - RNA, 20 nt, synthetic construct
  misc_feature 1..20: note = Synthetic
  source 1..20: mol_type = other RNA
gcccccgcccttgtatctca

SEQ ID NO: 1709 - RNA, 20 nt, synthetic construct
  misc_feature 1..20: note = Synthetic
  source 1..20: mol_type = other RNA
ctccatgagatacaagggcg

SEQ ID NO: 1710 - RNA, 20 nt, synthetic construct
  misc_feature 1..20: note = Synthetic
  source 1..20: mol_type = other RNA
gagtcaccgaggggagtact

SEQ ID NO: 1711 - RNA, 20 nt, synthetic construct
  misc_feature 1..20: note = Synthetic
  source 1..20: mol_type = other RNA
gtcgatggccgatgacttgt

SEQ ID NO: 1712 - RNA, 20 nt, synthetic construct
  misc_feature 1..20: note = Synthetic
  source 1..20: mol_type = other RNA
ccggtcaaaaacggttgcag

SEQ ID NO: 1713 - RNA, 20 nt, synthetic construct
  misc_feature 1..20: note = Synthetic
  source 1..20: mol_type = other RNA
tcagagaacaataaactcgt

SEQ ID NO: 1714 - RNA, 20 nt, synthetic construct
  misc_feature 1..20: note = Synthetic
  source 1..20: mol_type = other RNA
tgatgttctgttcgccacca

SEQ ID NO: 1715 - RNA, 20 nt, synthetic construct
  misc_feature 1..20: note = Synthetic
  source 1..20: mol_type = other RNA
cccctgcaaccgtttttgac

SEQ ID NO: 1716 - RNA, 20 nt, synthetic construct
  misc_feature 1..20: note = Synthetic
  source 1..20: mol_type = other RNA
tccatgagatacaagggcgg

SEQ ID NO: 1717 - RNA, 20 nt, synthetic construct
  misc_feature 1..20: note = Synthetic
  source 1..20: mol_type = other RNA
agtcatcggccatcgacatt

SEQ ID NO: 1718 - RNA, 20 nt, synthetic construct
  misc_feature 1..20: note = Synthetic
  source 1..20: mol_type = other RNA
ggccggtcaaaaacggttgc

SEQ ID NO: 1719 - RNA, 20 nt, synthetic construct
  misc_feature 1..20: note = Synthetic
  source 1..20: mol_type = other RNA
gcttatctccgtggcatcca

SEQ ID NO: 1720 - RNA, 20 nt, synthetic construct
  misc_feature 1..20: note = Synthetic
  source 1..20: mol_type = other RNA
tgtccattgcaatcaccggc

SEQ ID NO: 1721 - RNA, 20 nt, synthetic construct
  misc_feature 1..20: note = Synthetic
  source 1..20: mol_type = other RNA
ggacaccaggtcacggtgct

SEQ ID NO: 1722 - RNA, 20 nt, synthetic construct
  misc_feature 1..20: note = Synthetic
  source 1..20: mol_type = other RNA
tcttccgatttttctcgaca

SEQ ID NO: 1723 - RNA, 20 nt, synthetic construct
  misc_feature 1..20: note = Synthetic
  source 1..20: mol_type = other RNA
taccgtggcaaaagtaacca

SEQ ID NO: 1724 - RNA, 20 nt, synthetic construct
  misc_feature 1..20: note = Synthetic
  source 1..20: mol_type = other RNA
acagaacatcacggcggaaa

SEQ ID NO: 1725 - RNA, 20 nt, synthetic construct
  misc_feature 1..20: note = Synthetic
  source 1..20: mol_type = other RNA
gcgcccacgcaagtccacag

SEQ ID NO: 1726 - RNA, 20 nt, synthetic construct
  misc_feature 1..20: note = Synthetic
  source 1..20: mol_type = other RNA
cggaccgctgtggacttgcg

SEQ ID NO: 1727 - RNA, 20 nt, synthetic construct
  misc_feature 1..20: note = Synthetic
  source 1..20: mol_type = other RNA
cttctttgaaacccgctgca

SEQ ID NO: 1728 - RNA, 20 nt, synthetic construct
  misc_feature 1..20: note = Synthetic
  source 1..20: mol_type = other RNA
cctagacaggactactcggg

SEQ ID NO: 1729 - RNA, 20 nt, synthetic construct
  misc_feature 1..20: note = Synthetic
  source 1..20: mol_type = other RNA
tgtggacttgcgtgggcgcg

SEQ ID NO: 1730 - RNA, 20 nt, synthetic construct
  misc_feature 1..20: note = Synthetic
  source 1..20: mol_type = other RNA
ggaccgctgtggacttgcgt

SEQ ID NO: 1731 - RNA, 20 nt, synthetic construct
  misc_feature 1..20: note = Synthetic
  source 1..20: mol_type = other RNA
aaactgcaccagcgagtcgt

SEQ ID NO: 1732 - RNA, 20 nt, synthetic construct
  misc_feature 1..20: note = Synthetic
  source 1..20: mol_type = other RNA
cagtttcgctcaccccacgc

SEQ ID NO: 1733 - RNA, 20 nt, synthetic construct
  misc_feature 1..20: note = Synthetic
  source 1..20: mol_type = other RNA
ctgcaaggctgataacgctg

SEQ ID NO: 1734 - RNA, 20 nt, synthetic construct
  misc_feature 1..20: note = Synthetic
  source 1..20: mol_type = other RNA
cacgcaagtccacagcggtc

SEQ ID NO: 1735 - RNA, 20 nt, synthetic construct
  misc_feature 1..20: note = Synthetic
  source 1..20: mol_type = other RNA
tgggactcaattggcacact

SEQ ID NO: 1736 - RNA, 20 nt, synthetic construct
  misc_feature 1..20: note = Synthetic
  source 1..20: mol_type = other RNA
actgcaccagcgagtcgtcg

SEQ ID NO: 1737 - RNA, 20 nt, synthetic construct
  misc_feature 1..20: note = Synthetic
  source 1..20: mol_type = other RNA
ttgggactcaattggcacac

SEQ ID NO: 1738 - RNA, 20 nt, synthetic construct
  misc_feature 1..20: note = Synthetic
  source 1..20: mol_type = other RNA
agctcaccccgacgactcgc

SEQ ID NO: 1739 - RNA, 20 nt, synthetic construct
  misc_feature 1..20: note = Synthetic
  source 1..20: mol_type = other RNA
tttcaaagaagtactggcgg

SEQ ID NO: 1740 - RNA, 20 nt, synthetic construct
  misc_feature 1..20: note = Synthetic
  source 1..20: mol_type = other RNA
tcaaagaagtactggcggag

SEQ ID NO: 1741 - RNA, 20 nt, synthetic construct
  misc_feature 1..20: note = Synthetic
  source 1..20: mol_type = other RNA
cggccaaccgcagccggcgt

SEQ ID NO: 1742 - RNA, 20 nt, synthetic construct
  misc_feature 1..20: note = Synthetic
  source 1..20: mol_type = other RNA
gtgccccggccaaccgcagc

SEQ ID NO: 1743 - RNA, 20 nt, synthetic construct
  misc_feature 1..20: note = Synthetic
  source 1..20: mol_type = other RNA
agcgttatcagccttgcagc

SEQ ID NO: 1744 - RNA, 20 nt, synthetic construct
  misc_feature 1..20: note = Synthetic
  source 1..20: mol_type = other RNA
agcgggtttcaaagaagtac

SEQ ID NO: 1745 - RNA, 20 nt, synthetic construct
  misc_feature 1..20: note = Synthetic
  source 1..20: mol_type = other RNA
agcgagtcgtcggggtgagc

SEQ ID NO: 1746 - RNA, 20 nt, synthetic construct
  misc_feature 1..20: note = Synthetic
  source 1..20: mol_type = other RNA
aactgcaccagcgagtcgtc

SEQ ID NO: 1747 - RNA, 20 nt, synthetic construct
  misc_feature 1..20: note = Synthetic
  source 1..20: mol_type = other RNA
tggctagccaggtcgctgcg

SEQ ID NO: 1748 - RNA, 20 nt, synthetic construct
  misc_feature 1..20: note = Synthetic
  source 1..20: mol_type = other RNA
ccgtccgcctcgcagcatcg

SEQ ID NO: 1749 - RNA, 20 nt, synthetic construct
  misc_feature 1..20: note = Synthetic
  source 1..20: mol_type = other RNA
ctttgagtatatgcggcacg

SEQ ID NO: 1750 - RNA, 20 nt, synthetic construct
  misc_feature 1..20: note = Synthetic
  source 1..20: mol_type = other RNA
gcaatcgactgcatcacgca

SEQ ID NO: 1751 - RNA, 20 nt, synthetic construct
  misc_feature 1..20: note = Synthetic
  source 1..20: mol_type = other RNA
ggcgccgccgcgatgctgcg

SEQ ID NO: 1752 - RNA, 20 nt, synthetic construct
  misc_feature 1..20: note = Synthetic
  source 1..20: mol_type = other RNA
acggagaccactcttcacga

SEQ ID NO: 1753 - RNA, 20 nt, synthetic construct
  misc_feature 1..20: note = Synthetic
  source 1..20: mol_type = other RNA
cggcagccaatgagaccgtg

SEQ ID NO: 1754 - RNA, 20 nt, synthetic construct
  misc_feature 1..20: note = Synthetic
  source 1..20: mol_type = other RNA
gcccactagacagttgcgtg

SEQ ID NO: 1755 - RNA, 20 nt, synthetic construct
  misc_feature 1..20: note = Synthetic
  source 1..20: mol_type = other RNA
gtaccagctctccaacacgg

SEQ ID NO: 1756 - RNA, 20 nt, synthetic construct
  misc_feature 1..20: note = Synthetic
  source 1..20: mol_type = other RNA
caggaagaacgtgacgtgct

SEQ ID NO: 1757 - RNA, 20 nt, synthetic construct
  misc_feature 1..20: note = Synthetic
  source 1..20: mol_type = other RNA
tgatggcgtagacctctggt

SEQ ID NO: 1758 - RNA, 20 nt, synthetic construct
  misc_feature 1..20: note = Synthetic
  source 1..20: mol_type = other RNA
gagagactccagagcgttga

SEQ ID NO: 1759 - RNA, 20 nt, synthetic construct
  misc_feature 1..20: note = Synthetic
  source 1..20: mol_type = other RNA
ccctttcgagttcaaccccg

SEQ ID NO: 1760 - RNA, 20 nt, synthetic construct
  misc_feature 1..20: note = Synthetic
  source 1..20: mol_type = other RNA
cttcttcggcgtctgcaccg

SEQ ID NO: 1761 - RNA, 20 nt, synthetic construct
  misc_feature 1..20: note = Synthetic
  source 1..20: mol_type = other RNA
tcaccaccgagagcgacgtg

SEQ ID NO: 1762 - RNA, 20 nt, synthetic construct
  misc_feature 1..20: note = Synthetic
  source 1..20: mol_type = other RNA
ggcaatcgactgcatcacgc

SEQ ID NO: 1763 - RNA, 20 nt, synthetic construct
  misc_feature 1..20: note = Synthetic
  source 1..20: mol_type = other RNA
tctagcagcccgcaactgca

SEQ ID NO: 1764 - RNA, 20 nt, synthetic construct
  misc_feature 1..20: note = Synthetic
  source 1..20: mol_type = other RNA
gccgccgcgatgctgcgagg

SEQ ID NO: 1765 - RNA, 20 nt, synthetic construct
  misc_feature 1..20: note = Synthetic
  source 1..20: mol_type = other RNA
gaagagtggtctccgtttcg

SEQ ID NO: 1766 - RNA, 20 nt, synthetic construct
  misc_feature 1..20: note = Synthetic
  source 1..20: mol_type = other RNA
ccaggtgcccaatgcctcgg

SEQ ID NO: 1767 - RNA, 20 nt, synthetic construct
  misc_feature 1..20: note = Synthetic
  source 1..20: mol_type = other RNA
gcgcagacacccgtgccgca

SEQ ID NO: 1768 - RNA, 20 nt, synthetic construct
  misc_feature 1..20: note = Synthetic
  source 1..20: mol_type = other RNA
gttgccgttgttgacgtggg

SEQ ID NO: 1769 - RNA, 20 nt, synthetic construct
  misc_feature 1..20: note = Synthetic
  source 1..20: mol_type = other RNA
ccgggacatcgtgctcaagt

SEQ ID NO: 1770 - RNA, 20 nt, synthetic construct
  misc_feature 1..20: note = Synthetic
  source 1..20: mol_type = other RNA
tcggcaggacttccagcgtg

SEQ ID NO: 1771 - RNA, 20 nt, synthetic construct
  misc_feature 1..20: note = Synthetic
  source 1..20: mol_type = other RNA
cggtacaggatgctctcggg

SEQ ID NO: 1772 - RNA, 20 nt, synthetic construct
  misc_feature 1..20: note = Synthetic
  source 1..20: mol_type = other RNA
atgatggcgtagacctctgg

SEQ ID NO: 1773 - RNA, 20 nt, synthetic construct
  misc_feature 1..20: note = Synthetic
  source 1..20: mol_type = other RNA
aggtcttctcaccatcaccg

SEQ ID NO: 1774 - RNA, 20 nt, synthetic construct
  misc_feature 1..20: note = Synthetic
  source 1..20: mol_type = other RNA
ttacggtacaggatgctctc

SEQ ID NO: 1775 - RNA, 20 nt, synthetic construct
  misc_feature 1..20: note = Synthetic
  source 1..20: mol_type = other RNA
gctccacacgtcgctctcgg

SEQ ID NO: 1776 - RNA, 20 nt, synthetic construct
  misc_feature 1..20: note = Synthetic
  source 1..20: mol_type = other RNA
gtaccagggctgcttgccgt

SEQ ID NO: 1777 - RNA, 20 nt, synthetic construct
  misc_feature 1..20: note = Synthetic
  source 1..20: mol_type = other RNA
cagaggtctacgccatcatg

SEQ ID NO: 1778 - RNA, 20 nt, synthetic construct
  misc_feature 1..20: note = Synthetic
  source 1..20: mol_type = other RNA
cgcagtcccgaggagccgtg

SEQ ID NO: 1779 - RNA, 20 nt, synthetic construct
  misc_feature 1..20: note = Synthetic
  source 1..20: mol_type = other RNA
tcgcagtcccgaggagccgt

SEQ ID NO: 1780 - RNA, 20 nt, synthetic construct
  misc_feature 1..20: note = Synthetic
  source 1..20: mol_type = other RNA
cctcgggactgcgatgcacc

SEQ ID NO: 1781 - RNA, 20 nt, synthetic construct
  misc_feature 1..20: note = Synthetic
  source 1..20: mol_type = other RNA
cccagcaccatcgtgaagag

SEQ ID NO: 1782 - RNA, 20 nt, synthetic construct
  misc_feature 1..20: note = Synthetic
  source 1..20: mol_type = other RNA
actcacaggcgactgagccg

SEQ ID NO: 1783 - RNA, 20 nt, synthetic construct
  misc_feature 1..20: note = Synthetic
  source 1..20: mol_type = other RNA
gggcacctggaccttcagcg

SEQ ID NO: 1784 - RNA, 20 nt, synthetic construct
  misc_feature 1..20: note = Synthetic
  source 1..20: mol_type = other RNA
gtcgtcccccacatccaccg

SEQ ID NO: 1785 - RNA, 20 nt, synthetic construct
  misc_feature 1..20: note = Synthetic
  source 1..20: mol_type = other RNA
gaagctggtctcattgagca

SEQ ID NO: 1786 - RNA, 20 nt, synthetic construct
  misc_feature 1..20: note = Synthetic
  source 1..20: mol_type = other RNA
caacggcaactacacgctgc

SEQ ID NO: 1787 - RNA, 20 nt, synthetic construct
  misc_feature 1..20: note = Synthetic
  source 1..20: mol_type = other RNA
gcagtctccttctcgccggt

SEQ ID NO: 1788 - RNA, 20 nt, synthetic construct
  misc_feature 1..20: note = Synthetic
  source 1..20: mol_type = other RNA
cggtggtgaacttacggtac

SEQ ID NO: 1789 - RNA, 20 nt, synthetic construct
  misc_feature 1..20: note = Synthetic
  source 1..20: mol_type = other RNA
agttgcgggctgctagatct

SEQ ID NO: 1790 - RNA, 20 nt, synthetic construct
  misc_feature 1..20: note = Synthetic
  source 1..20: mol_type = other RNA
gactgcgatgcacccgggat

SEQ ID NO: 1791 - RNA, 20 nt, synthetic construct
  misc_feature 1..20: note = Synthetic
  source 1..20: mol_type = other RNA
cggacactcacagctcagtc

SEQ ID NO: 1792 - RNA, 20 nt, synthetic construct
  misc_feature 1..20: note = Synthetic
  source 1..20: mol_type = other RNA
atctggagctccgtgatctg

SEQ ID NO: 1793 - RNA, 20 nt, synthetic construct
  misc_feature 1..20: note = Synthetic
  source 1..20: mol_type = other RNA
aggcatctggcgccacgaaa

SEQ ID NO: 1794 - RNA, 20 nt, synthetic construct
  misc_feature 1..20: note = Synthetic
  source 1..20: mol_type = other RNA
ggcacctggaccttcagcgt

SEQ ID NO: 1795 - RNA, 20 nt, synthetic construct
  misc_feature 1..20: note = Synthetic
  source 1..20: mol_type = other RNA
gtcgctgcaccagatccgag

SEQ ID NO: 1796 - RNA, 20 nt, synthetic construct
  misc_feature 1..20: note = Synthetic
  source 1..20: mol_type = other RNA
attacgtacaatgcacagtg

SEQ ID NO: 1797 - RNA, 20 nt, synthetic construct
  misc_feature 1..20: note = Synthetic
  source 1..20: mol_type = other RNA
gcttcagtggttctataacg

SEQ ID NO: 1798 - RNA, 20 nt, synthetic construct
  misc_feature 1..20: note = Synthetic
  source 1..20: mol_type = other RNA
atcatcattgctgataacgg

SEQ ID NO: 1799 - RNA, 20 nt, synthetic construct
  misc_feature 1..20: note = Synthetic
  source 1..20: mol_type = other RNA
acgcaaggacttccaccgtg

SEQ ID NO: 1800 - RNA, 20 nt, synthetic construct
  misc_feature 1..20: note = Synthetic
  source 1..20: mol_type = other RNA
accaatcacacggagtacca

SEQ ID NO: 1801 - RNA, 20 nt, synthetic construct
  misc_feature 1..20: note = Synthetic
  source 1..20: mol_type = other RNA
gccccagagccgcgccatgg

SEQ ID NO: 1802 - RNA, 20 nt, synthetic construct
  misc_feature 1..20: note = Synthetic
  source 1..20: mol_type = other RNA
accactgaagcgctggtttg

SEQ ID NO: 1803 - RNA, 20 nt, synthetic construct
  misc_feature 1..20: note = Synthetic
  source 1..20: mol_type = other RNA
ggttttatcagtgacgtctg

SEQ ID NO: 1804 - RNA, 20 nt, synthetic construct
  misc_feature 1..20: note = Synthetic
  source 1..20: mol_type = other RNA
caagttctatggcgtctgcg

SEQ ID NO: 1805 - RNA, 20 nt, synthetic construct
  misc_feature 1..20: note = Synthetic
  source 1..20: mol_type = other RNA
atcgcggtgcacgaagtgct

SEQ ID NO: 1806 - RNA, 20 nt, synthetic construct
  misc_feature 1..20: note = Synthetic
  source 1..20: mol_type = other RNA
gtcagtgctgtacacgtccc

SEQ ID NO: 1807 - RNA, 20 nt, synthetic construct
  misc_feature 1..20: note = Synthetic
  source 1..20: mol_type = other RNA
cattgtgtggccaccgacct

SEQ ID NO: 1808 - RNA, 20 nt, synthetic construct
  misc_feature 1..20: note = Synthetic
  source 1..20: mol_type = other RNA
accccaaaccagcgcttcag

SEQ ID NO: 1809 - RNA, 20 nt, synthetic construct
  misc_feature 1..20: note = Synthetic
  source 1..20: mol_type = other RNA
gccgtggtactccgtgtgat

SEQ ID NO: 1810 - RNA, 20 nt, synthetic construct
  misc_feature 1..20: note = Synthetic
  source 1..20: mol_type = other RNA
aactgcagcgaatgacatcg

SEQ ID NO: 1811 - RNA, 20 nt, synthetic construct
  misc_feature 1..20: note = Synthetic
  source 1..20: mol_type = other RNA
caccgagagatgttcccgac

SEQ ID NO: 1812 - RNA, 20 nt, synthetic construct
  misc_feature 1..20: note = Synthetic
  source 1..20: mol_type = other RNA
acgtcactgataaaaccggt

SEQ ID NO: 1813 - RNA, 20 nt, synthetic construct
  misc_feature 1..20: note = Synthetic
  source 1..20: mol_type = other RNA
tgtggtggtgattgcgtctg

SEQ ID NO: 1814 - RNA, 20 nt, synthetic construct
  misc_feature 1..20: note = Synthetic
  source 1..20: mol_type = other RNA
gttctatggcgtctgcgtgg

SEQ ID NO: 1815 - RNA, 20 nt, synthetic construct
  misc_feature 1..20: note = Synthetic
  source 1..20: mol_type = other RNA
gactgcgtcagttccgtggg

SEQ ID NO: 1816 - RNA, 20 nt, synthetic construct
  misc_feature 1..20: note = Synthetic
  source 1..20: mol_type = other RNA
ctgcgactgcgtcagttccg

SEQ ID NO: 1817 - RNA, 20 nt, synthetic construct
  misc_feature 1..20: note = Synthetic
  source 1..20: mol_type = other RNA
ggctgagggcaacccgccca

SEQ ID NO: 1818 - RNA, 20 nt, synthetic construct
  misc_feature 1..20: note = Synthetic
  source 1..20: mol_type = other RNA
tatagcccagcagatcgccg

SEQ ID NO: 1819 - RNA, 20 nt, synthetic construct
  misc_feature 1..20: note = Synthetic
  source 1..20: mol_type = other RNA
catgtacaggaaattcacga

SEQ ID NO: 1820 - RNA, 20 nt, synthetic construct
  misc_feature 1..20: note = Synthetic
  source 1..20: mol_type = other RNA
gtaccagctgtcaaacaatg

SEQ ID NO: 1821 - RNA, 20 nt, synthetic construct
  misc_feature 1..20: note = Synthetic
  source 1..20: mol_type = other RNA
ggtgatagagtgtatcactc

SEQ ID NO: 1822 - RNA, 20 nt, synthetic construct
  misc_feature 1..20: note = Synthetic
  source 1..20: mol_type = other RNA
gcactgcatttgcaggacgt

SEQ ID NO: 1823 - RNA, 20 nt, synthetic construct
  misc_feature 1..20: note = Synthetic
  source 1..20: mol_type = other RNA
cgacccttctcctggcatcg

SEQ ID NO: 1824 - RNA, 20 nt, synthetic construct
  misc_feature 1..20: note = Synthetic
  source 1..20: mol_type = other RNA
cgtcactgataaaaccggtc

SEQ ID NO: 1825 - RNA, 20 nt, synthetic construct
  misc_feature 1..20: note = Synthetic
  source 1..20: mol_type = other RNA
cgccaggtagaccatgcccg

SEQ ID NO: 1826 - RNA, 20 nt, synthetic construct
  misc_feature 1..20: note = Synthetic
  source 1..20: mol_type = other RNA
gtacagcactgactactaca

SEQ ID NO: 1827 - RNA, 20 nt, synthetic construct
  misc_feature 1..20: note = Synthetic
  source 1..20: mol_type = other RNA
gcattgtgtggccaccgacc

SEQ ID NO: 1828 - RNA, 20 nt, synthetic construct
  misc_feature 1..20: note = Synthetic
  source 1..20: mol_type = other RNA
tcacgacggaaagcgacgtc

SEQ ID NO: 1829 - RNA, 20 nt, synthetic construct
  misc_feature 1..20: note = Synthetic
  source 1..20: mol_type = other RNA
aaggtggcatggacccgcca

SEQ ID NO: 1830 - RNA, 20 nt, synthetic construct
  misc_feature 1..20: note = Synthetic
  source 1..20: mol_type = other RNA
catgcccgcggcgatctgct

SEQ ID NO: 1831 - RNA, 20 nt, synthetic construct
  misc_feature 1..20: note = Synthetic
  source 1..20: mol_type = other RNA
agtcagtgctgtacacgtcc

SEQ ID NO: 1832 - RNA, 20 nt, synthetic construct
  misc_feature 1..20: note = Synthetic
  source 1..20: mol_type = other RNA
acctcctgggggcacgtgcg

SEQ ID NO: 1833 - RNA, 20 nt, synthetic construct
  misc_feature 1..20: note = Synthetic
  source 1..20: mol_type = other RNA
gcgaccccgcacgtgccccc

SEQ ID NO: 1834 - RNA, 20 nt, synthetic construct
  misc_feature 1..20: note = Synthetic
  source 1..20: mol_type = other RNA
ggcatggacccgccatggcg

SEQ ID NO: 1835 - RNA, 20 nt, synthetic construct
  misc_feature 1..20: note = Synthetic
  source 1..20: mol_type = other RNA
catcgtggcatttccgagat

SEQ ID NO: 1836 - RNA, 20 nt, synthetic construct
  misc_feature 1..20: note = Synthetic
  source 1..20: mol_type = other RNA
gtattgggatgttggtaacc

SEQ ID NO: 1837 - RNA, 20 nt, synthetic construct
  misc_feature 1..20: note = Synthetic
  source 1..20: mol_type = other RNA
gcgcttcagtggttctataa

SEQ ID NO: 1838 - RNA, 20 nt, synthetic construct
  misc_feature 1..20: note = Synthetic
  source 1..20: mol_type = other RNA
aaccggtcgggaacatctct

SEQ ID NO: 1839 - RNA, 20 nt, synthetic construct
  misc_feature 1..20: note = Synthetic
  source 1..20: mol_type = other RNA
actgcgtcagttccgtgggc

SEQ ID NO: 1840 - RNA, 20 nt, synthetic construct
  misc_feature 1..20: note = Synthetic
  source 1..20: mol_type = other RNA
tgcgactgcgtcagttccgt

SEQ ID NO: 1841 - RNA, 20 nt, synthetic construct
  misc_feature 1..20: note = Synthetic
  source 1..20: mol_type = other RNA
ccagcagatcgccgcgggca

SEQ ID NO: 1842 - RNA, 20 nt, synthetic construct
  misc_feature 1..20: note = Synthetic
  source 1..20: mol_type = other RNA
aatgcagtgcctctcggatc

SEQ ID NO: 1843 - RNA, 20 nt, synthetic construct
  misc_feature 1..20: note = Synthetic
  source 1..20: mol_type = other RNA
gcctgccaggaggctaacta

SEQ ID NO: 1844 - RNA, 20 nt, synthetic construct
  misc_feature 1..20: note = Synthetic
  source 1..20: mol_type = other RNA
ttccatccgcaggagctaca

SEQ ID NO: 1845 - RNA, 20 nt, synthetic construct
  misc_feature 1..20: note = Synthetic
  source 1..20: mol_type = other RNA
agtagcggccatgcactgcc

SEQ ID NO: 1846 - RNA, 20 nt, synthetic construct
  misc_feature 1..20: note = Synthetic
  source 1..20: mol_type = other RNA
ctggcagagcaagcgcactg

SEQ ID NO: 1847 - RNA, 20 nt, synthetic construct
  misc_feature 1..20: note = Synthetic
  source 1..20: mol_type = other RNA
gcgcactgagggcattgtgt

SEQ ID NO: 1848 - RNA, 20 nt, synthetic construct
  misc_feature 1..20: note = Synthetic
  source 1..20: mol_type = other RNA
accgtagttagcctcctggc

SEQ ID NO: 1849 - RNA, 20 nt, synthetic construct
  misc_feature 1..20: note = Synthetic
  source 1..20: mol_type = other RNA
tggcagagcaagcgcactga

SEQ ID NO: 1850 - RNA, 20 nt, synthetic construct
  misc_feature 1..20: note = Synthetic
  source 1..20: mol_type = other RNA
gggcaccgtagttagcctcc

SEQ ID NO: 1851 - RNA, 20 nt, synthetic construct
  misc_feature 1..20: note = Synthetic
  source 1..20: mol_type = other RNA
acaccacagcgtctccccga

SEQ ID NO: 1852 - RNA, 20 nt, synthetic construct
  misc_feature 1..20: note = Synthetic
  source 1..20: mol_type = other RNA
aggccgtcggggagacgctg

SEQ ID NO: 1853 - RNA, 20 nt, synthetic construct
  misc_feature 1..20: note = Synthetic
  source 1..20: mol_type = other RNA
gagacgctgtggtgtgactg

SEQ ID NO: 1854 - RNA, 20 nt, synthetic construct
  misc_feature 1..20: note = Synthetic
  source 1..20: mol_type = other RNA
cgactgcacctggcacatgg

SEQ ID NO: 1855 - RNA, 20 nt, synthetic construct
  misc_feature 1..20: note = Synthetic
  source 1..20: mol_type = other RNA
gtgatggggaccacgatgaa

SEQ ID NO: 1856 - RNA, 20 nt, synthetic construct
  misc_feature 1..20: note = Synthetic
  source 1..20: mol_type = other RNA
gcgccgcgggaggcggcaca

SEQ ID NO: 1857 - RNA, 20 nt, synthetic construct
  misc_feature 1..20: note = Synthetic
  source 1..20: mol_type = other RNA
agtggtcatgaagaggtgat

SEQ ID NO: 1858 - RNA, 20 nt, synthetic construct
  misc_feature 1..20: note = Synthetic
  source 1..20: mol_type = other RNA
aggttcttcctggcagtgca

SEQ ID NO: 1859 - RNA, 20 nt, synthetic construct
  misc_feature 1..20: note = Synthetic
  source 1..20: mol_type = other RNA
gggtagaggatgctgccggg

SEQ ID NO: 1860 - RNA, 20 nt, synthetic construct
  misc_feature 1..20: note = Synthetic
  source 1..20: mol_type = other RNA
gtcacccggtcataggaagg

SEQ ID NO: 1861 - RNA, 20 nt, synthetic construct
  misc_feature 1..20: note = Synthetic
  source 1..20: mol_type = other RNA
aaagagctgcatgccgacca

SEQ ID NO: 1862 - RNA, 20 nt, synthetic construct
  misc_feature 1..20: note = Synthetic
  source 1..20: mol_type = other RNA
cgtcattggatagtgctcca

SEQ ID NO: 1863 - RNA, 20 nt, synthetic construct
  misc_feature 1..20: note = Synthetic
  source 1..20: mol_type = other RNA
gtgtcgtcggggcacaaaca

SEQ ID NO: 1864 - RNA, 20 nt, synthetic construct
  misc_feature 1..20: note = Synthetic
  source 1..20: mol_type = other RNA
ctgagtcattagtcgaaaca

SEQ ID NO: 1865 - RNA, 20 nt, synthetic construct
  misc_feature 1..20: note = Synthetic
  source 1..20: mol_type = other RNA
ccgggtgacaaagccaattg

SEQ ID NO: 1866 - RNA, 20 nt, synthetic construct
  misc_feature 1..20: note = Synthetic
  source 1..20: mol_type = other RNA
cagctttagagggcgagcaa

SEQ ID NO: 1867 - RNA, 20 nt, synthetic construct
  misc_feature 1..20: note = Synthetic
  source 1..20: mol_type = other RNA
tttgtcacccggtcatagga

SEQ ID NO: 1868 - RNA, 20 nt, synthetic construct
  misc_feature 1..20: note = Synthetic
  source 1..20: mol_type = other RNA
gcgtgggagttgacaatcac

SEQ ID NO: 1869 - RNA, 20 nt, synthetic construct
  misc_feature 1..20: note = Synthetic
  source 1..20: mol_type = other RNA
tggcgagtccaagttctacc

SEQ ID NO: 1870 - RNA, 20 nt, synthetic construct
  misc_feature 1..20: note = Synthetic
  source 1..20: mol_type = other RNA
agaacttggactcgccaatg

SEQ ID NO: 1871 - RNA, 20 nt, synthetic construct
  misc_feature 1..20: note = Synthetic
  source 1..20: mol_type = other RNA
tggctttgtcacccggtcat

SEQ ID NO: 1872 - RNA, 20 nt, synthetic construct
  misc_feature 1..20: note = Synthetic
  source 1..20: mol_type = other RNA
ttaacaccacaactggtgac

SEQ ID NO: 1873 - RNA, 20 nt, synthetic construct
  misc_feature 1..20: note = Synthetic
  source 1..20: mol_type = other RNA
aaagacgattaagacgatgt

SEQ ID NO: 1874 - RNA, 20 nt, synthetic construct
  misc_feature 1..20: note = Synthetic
  source 1..20: mol_type = other RNA
ttgtgttccgcgtgctgtgt

SEQ ID NO: 1875 - RNA, 20 nt, synthetic construct
  misc_feature 1..20: note = Synthetic
  source 1..20: mol_type = other RNA
aactgaaggtccaccaacca

SEQ ID NO: 1876 - RNA, 20 nt, synthetic construct
  misc_feature 1..20: note = Synthetic
  source 1..20: mol_type = other RNA
tcccgatgcaactcagttca

SEQ ID NO: 1877 - RNA, 20 nt, synthetic construct
  misc_feature 1..20: note = Synthetic
  source 1..20: mol_type = other RNA
gggtggcttactgttgagaa

SEQ ID NO: 1878 - RNA, 20 nt, synthetic construct
  misc_feature 1..20: note = Synthetic
  source 1..20: mol_type = other RNA
ggtacagtcacagtaagact

SEQ ID NO: 1879 - RNA, 20 nt, synthetic construct
  misc_feature 1..20: note = Synthetic
  source 1..20: mol_type = other RNA
catggagcactatccaatga

SEQ ID NO: 1880 - RNA, 20 nt, synthetic construct
  misc_feature 1..20: note = Synthetic
  source 1..20: mol_type = other RNA
gaccctaataaagttaaccc

SEQ ID NO: 1881 - RNA, 20 nt, synthetic construct
  misc_feature 1..20: note = Synthetic
  source 1..20: mol_type = other RNA
gtcaaacctgtcaccagttg

SEQ ID NO: 1882 - RNA, 20 nt, synthetic construct
  misc_feature 1..20: note = Synthetic
  source 1..20: mol_type = other RNA
tgtagaagaacagcccgtag

SEQ ID NO: 1883 - RNA, 20 nt, synthetic construct
  misc_feature 1..20: note = Synthetic
  source 1..20: mol_type = other RNA
ttaagtgggtacataccact

SEQ ID NO: 1884 - RNA, 20 nt, synthetic construct
  misc_feature 1..20: note = Synthetic
  source 1..20: mol_type = other RNA
acgcttagcctggtagaact

SEQ ID NO: 1885 - RNA, 20 nt, synthetic construct
  misc_feature 1..20: note = Synthetic
  source 1..20: mol_type = other RNA
tcagttcctacatcgcctgt

SEQ ID NO: 1886 - RNA, 20 nt, synthetic construct
  misc_feature 1..20: note = Synthetic
  source 1..20: mol_type = other RNA
cagtaggtcatcccggatgc

SEQ ID NO: 1887 - RNA, 20 nt, synthetic construct
  misc_feature 1..20: note = Synthetic
  source 1..20: mol_type = other RNA
acggctctcgttatcctcaa

SEQ ID NO: 1888 - RNA, 20 nt, synthetic construct
  misc_feature 1..20: note = Synthetic
  source 1..20: mol_type = other RNA
cttgtttcgactaatgactc

SEQ ID NO: 1889 - RNA, 20 nt, synthetic construct
  misc_feature 1..20: note = Synthetic
  source 1..20: mol_type = other RNA
ctgaaatcgtcttcaatgct

SEQ ID NO: 1890 - RNA, 20 nt, synthetic construct
  misc_feature 1..20: note = Synthetic
  source 1..20: mol_type = other RNA
caatgagtaaccctcctgat

SEQ ID NO: 1891 - RNA, 20 nt, synthetic construct
  misc_feature 1..20: note = Synthetic
  source 1..20: mol_type = other RNA
tggtagtcacatattcactc

SEQ ID NO: 1892 - RNA, 20 nt, synthetic construct
  misc_feature 1..20: note = Synthetic
  source 1..20: mol_type = other RNA
agctgtccaacaggcgatgt

SEQ ID NO: 1893 - RNA, 20 nt, synthetic construct
  misc_feature 1..20: note = Synthetic
  source 1..20: mol_type = other RNA
tggcagtgtttccagcgaat

SEQ ID NO: 1894 - RNA, 20 nt, synthetic construct
  misc_feature 1..20: note = Synthetic
  source 1..20: mol_type = other RNA
atgacctactggtctgactc

SEQ ID NO: 1895 - RNA, 20 nt, synthetic construct
  misc_feature 1..20: note = Synthetic
  source 1..20: mol_type = other RNA
tgcgtctctctccgtgtcgt

SEQ ID NO: 1896 - RNA, 20 nt, synthetic construct
  misc_feature 1..20: note = Synthetic
  source 1..20: mol_type = other RNA
cattttgtcacgcatcaatc

SEQ ID NO: 1897 - RNA, 20 nt, synthetic construct
  misc_feature 1..20: note = Synthetic
  source 1..20: mol_type = other RNA
cagattgatgcgtgacaaaa

SEQ ID NO: 1898 - RNA, 20 nt, synthetic construct
  misc_feature 1..20: note = Synthetic
  source 1..20: mol_type = other RNA
ctttagtagtgaatcggatc

SEQ ID NO: 1899 - RNA, 20 nt, synthetic construct
  misc_feature 1..20: note = Synthetic
  source 1..20: mol_type = other RNA
cagcatccgggatgacctac

SEQ ID NO: 1900 - RNA, 20 nt, synthetic construct
  misc_feature 1..20: note = Synthetic
  source 1..20: mol_type = other RNA
ttgtttgtgccccgacgaca

SEQ ID NO: 1901 - RNA, 20 nt, synthetic construct
  misc_feature 1..20: note = Synthetic
  source 1..20: mol_type = other RNA
cgtctctctccgtgtcgtcg

SEQ ID NO: 1902 - RNA, 20 nt, synthetic construct
  misc_feature 1..20: note = Synthetic
  source 1..20: mol_type = other RNA
tagtctttgttgagcatccg

SEQ ID NO: 1903 - RNA, 20 nt, synthetic construct
  misc_feature 1..20: note = Synthetic
  source 1..20: mol_type = other RNA
tgtcaatcggttcccttcaa

SEQ ID NO: 1904 - RNA, 20 nt, synthetic construct
  misc_feature 1..20: note = Synthetic
  source 1..20: mol_type = other RNA
actcttggaactcaacttag

SEQ ID NO: 1905 - RNA, 20 nt, synthetic construct
  misc_feature 1..20: note = Synthetic
  source 1..20: mol_type = other RNA
ggatgctctacgaatacaga

SEQ ID NO: 1906 - RNA, 20 nt, synthetic construct
  misc_feature 1..20: note = Synthetic
  source 1..20: mol_type = other RNA
tccgaatagttgaacataac

SEQ ID NO: 1907 - RNA, 20 nt, synthetic construct
  misc_feature 1..20: note = Synthetic
  source 1..20: mol_type = other RNA
tggtacagtcacagtaagac

SEQ ID NO: 1908 - RNA, 20 nt, synthetic construct
  misc_feature 1..20: note = Synthetic
  source 1..20: mol_type = other RNA
tttggtcacactatcatacg

SEQ ID NO: 1909 - RNA, 20 nt, synthetic construct
  misc_feature 1..20: note = Synthetic
  source 1..20: mol_type = other RNA
ttggtcacactatcatacga

SEQ ID NO: 1910 - RNA, 20 nt, synthetic construct
  misc_feature 1..20: note = Synthetic
  source 1..20: mol_type = other RNA
cagcttcagaggtcgagcaa

SEQ ID NO: 1911 - RNA, 20 nt, synthetic construct
  misc_feature 1..20: note = Synthetic
  source 1..20: mol_type = other RNA
atccatccatcccttaaacg

SEQ ID NO: 1912 - RNA, 20 nt, synthetic construct
  misc_feature 1..20: note = Synthetic
  source 1..20: mol_type = other RNA
ctcttgtttgcgtttcaacg

SEQ ID NO: 1913 - RNA, 20 nt, synthetic construct
  misc_feature 1..20: note = Synthetic
  source 1..20: mol_type = other RNA
agagatgtttgatgtaagcg

SEQ ID NO: 1914 - RNA, 20 nt, synthetic construct
  misc_feature 1..20: note = Synthetic
  source 1..20: mol_type = other RNA
gtcacactatcatacgaggg

SEQ ID NO: 1915 - RNA, 20 nt, synthetic construct
  misc_feature 1..20: note = Synthetic
  source 1..20: mol_type = other RNA
ttgagtcatgagacgaaata

SEQ ID NO: 1916 - RNA, 20 nt, synthetic construct
  misc_feature 1..20: note = Synthetic
  source 1..20: mol_type = other RNA
ggagccacggatgctcagta

SEQ ID NO: 1917 - RNA, 20 nt, synthetic construct
  misc_feature 1..20: note = Synthetic
  source 1..20: mol_type = other RNA
ggtagaagggcccccgacca

SEQ ID NO: 1918 - RNA, 20 nt, synthetic construct
  misc_feature 1..20: note = Synthetic
  source 1..20: mol_type = other RNA
tatggagcactatcccatga

SEQ ID NO: 1919 - RNA, 20 nt, synthetic construct
  misc_feature 1..20: note = Synthetic
  source 1..20: mol_type = other RNA
atgattgtgaactcccacgc

SEQ ID NO: 1920 - RNA, 20 nt, synthetic construct
  misc_feature 1..20: note = Synthetic
  source 1..20: mol_type = other RNA
gatattggagctcccgccga

SEQ ID NO: 1921 - RNA, 20 nt, synthetic construct
  misc_feature 1..20: note = Synthetic
  source 1..20: mol_type = other RNA
ggtagcgtctgtaagccctc

SEQ ID NO: 1922 - RNA, 20 nt, synthetic construct
  misc_feature 1..20: note = Synthetic
  source 1..20: mol_type = other RNA
ccagtctggagggttactca

SEQ ID NO: 1923 - RNA, 20 nt, synthetic construct
  misc_feature 1..20: note = Synthetic
  source 1..20: mol_type = other RNA
ctctccaagacgcaacagta

SEQ ID NO: 1924 - RNA, 20 nt, synthetic construct
  misc_feature 1..20: note = Synthetic
  source 1..20: mol_type = other RNA
actgctgaactgctccgtca

SEQ ID NO: 1925 - RNA, 20 nt, synthetic construct
  misc_feature 1..20: note = Synthetic
  source 1..20: mol_type = other RNA
agttctccgatcattccggc

SEQ ID NO: 1926 - RNA, 20 nt, synthetic construct
  misc_feature 1..20: note = Synthetic
  source 1..20: mol_type = other RNA
atcatacgagggtggagacg

SEQ ID NO: 1927 - RNA, 20 nt, synthetic construct
  misc_feature 1..20: note = Synthetic
  source 1..20: mol_type = other RNA
cagtcagtgctggtaccgcc

SEQ ID NO: 1928 - RNA, 20 nt, synthetic construct
  misc_feature 1..20: note = Synthetic
  source 1..20: mol_type = other RNA
tgtaggcctgaagaccattg

SEQ ID NO: 1929 - RNA, 20 nt, synthetic construct
  misc_feature 1..20: note = Synthetic
  source 1..20: mol_type = other RNA
ctgctgaactgctccgtcat

SEQ ID NO: 1930 - RNA, 20 nt, synthetic construct
  misc_feature 1..20: note = Synthetic
  source 1..20: mol_type = other RNA
ccatgagtaaccctccagac

SEQ ID NO: 1931 - RNA, 20 nt, synthetic construct
  misc_feature 1..20: note = Synthetic
  source 1..20: mol_type = other RNA
ctaagcgtgtttgcgctaat

SEQ ID NO: 1932 - RNA, 20 nt, synthetic construct
  misc_feature 1..20: note = Synthetic
  source 1..20: mol_type = other RNA
tagtccttactgagcatccg

SEQ ID NO: 1933 - RNA, 20 nt, synthetic construct
  misc_feature 1..20: note = Synthetic
  source 1..20: mol_type = other RNA
gcacgaacagagagtctctt

SEQ ID NO: 1934 - RNA, 20 nt, synthetic construct
  misc_feature 1..20: note = Synthetic
  source 1..20: mol_type = other RNA
tggtgtggtctccctggtcg

SEQ ID NO: 1935 - RNA, 20 nt, synthetic construct
  misc_feature 1..20: note = Synthetic
  source 1..20: mol_type = other RNA
ttgagagcaatcaaactgcc

SEQ ID NO: 1936 - RNA, 20 nt, synthetic construct
  misc_feature 1..20: note = Synthetic
  source 1..20: mol_type = other RNA
cgtttcaacgtggtcgtaat

SEQ ID NO: 1937 - RNA, 20 nt, synthetic construct
  misc_feature 1..20: note = Synthetic
  source 1..20: mol_type = other RNA
gcgttgttcaatagcagcaa

SEQ ID NO: 1938 - RNA, 20 nt, synthetic construct
  misc_feature 1..20: note = Synthetic
  source 1..20: mol_type = other RNA
gagacccaaacaggaacgca

SEQ ID NO: 1939 - RNA, 20 nt, synthetic construct
  misc_feature 1..20: note = Synthetic
  source 1..20: mol_type = other RNA
acgggatccatggaattggt

SEQ ID NO: 1940 - RNA, 20 nt, synthetic construct
  misc_feature 1..20: note = Synthetic
  source 1..20: mol_type = other RNA
aaatgacagagtccgaaaat

SEQ ID NO: 1941 - RNA, 20 nt, synthetic construct
  misc_feature 1..20: note = Synthetic
  source 1..20: mol_type = other RNA
ctcgccctactgttgcgtct

SEQ ID NO: 1942 - RNA, 20 nt, synthetic construct
  misc_feature 1..20: note = Synthetic
  source 1..20: mol_type = other RNA
tctctccaagacgcaacagt

SEQ ID NO: 1943 - RNA, 20 nt, synthetic construct
  misc_feature 1..20: note = Synthetic
  source 1..20: mol_type = other RNA
catagcgctgtggactgcaa

SEQ ID NO: 1944 - RNA, 20 nt, synthetic construct
  misc_feature 1..20: note = Synthetic
  source 1..20: mol_type = other RNA
ctgctaaagtgggttgcata

SEQ ID NO: 1945 - RNA, 20 nt, synthetic construct
  misc_feature 1..20: note = Synthetic
  source 1..20: mol_type = other RNA
gctcttccatctgtattcga

SEQ ID NO: 1946 - RNA, 20 nt, synthetic construct
  misc_feature 1..20: note = Synthetic
  source 1..20: mol_type = other RNA
aatttaccagccggaatgat

SEQ ID NO: 1947 - RNA, 20 nt, synthetic construct
  misc_feature 1..20: note = Synthetic
  source 1..20: mol_type = other RNA
gcgtgggagttcacaatcat

SEQ ID NO: 1948 - RNA, 20 nt, synthetic construct
  misc_feature 1..20: note = Synthetic
  source 1..20: mol_type = other RNA
gcatactcacatcaacaatc

SEQ ID NO: 1949 - RNA, 20 nt, synthetic construct
  misc_feature 1..20: note = Synthetic
  source 1..20: mol_type = other RNA
aactttgataacgtaggact

SEQ ID NO: 1950 - RNA, 20 nt, synthetic construct
  misc_feature 1..20: note = Synthetic
  source 1..20: mol_type = other RNA
cacgttgaaacgcaaacaag

SEQ ID NO: 1951 - RNA, 20 nt, synthetic construct
  misc_feature 1..20: note = Synthetic
  source 1..20: mol_type = other RNA
gtaggcctgaagaccattgt

SEQ ID NO: 1952 - RNA, 20 nt, synthetic construct
  misc_feature 1..20: note = Synthetic
  source 1..20: mol_type = other RNA
gggtagaagggcccccgacc

SEQ ID NO: 1953 - RNA, 20 nt, synthetic construct
  misc_feature 1..20: note = Synthetic
  source 1..20: mol_type = other RNA
attcagcagcgagtcagata

SEQ ID NO: 1954 - RNA, 20 nt, synthetic construct
  misc_feature 1..20: note = Synthetic
  source 1..20: mol_type = other RNA
tgtcttcagattccgatttt

SEQ ID NO: 1955 - RNA, 20 nt, synthetic construct
  misc_feature 1..20: note = Synthetic
  source 1..20: mol_type = other RNA
gcatggtgggcatttctgtc

SEQ ID NO: 1956 - RNA, 20 nt, synthetic construct
  misc_feature 1..20: note = Synthetic
  source 1..20: mol_type = other RNA
ccgttgtcatgttaacacag

SEQ ID NO: 1957 - RNA, 20 nt, synthetic construct
  misc_feature 1..20: note = Synthetic
  source 1..20: mol_type = other RNA
atggtggaaacggatgacca

SEQ ID NO: 1958 - RNA, 20 nt, synthetic construct
  misc_feature 1..20: note = Synthetic
  source 1..20: mol_type = other RNA
cctagacattacgtgctgct

SEQ ID NO: 1959 - RNA, 20 nt, synthetic construct
  misc_feature 1..20: note = Synthetic
  source 1..20: mol_type = other RNA
ctcttggcaagcaagctcgg

SEQ ID NO: 1960 - RNA, 20 nt, synthetic construct
  misc_feature 1..20: note = Synthetic
  source 1..20: mol_type = other RNA
tcaaaagcagaatcgcttgg

SEQ ID NO: 1961 - RNA, 20 nt, synthetic construct
  misc_feature 1..20: note = Synthetic
  source 1..20: mol_type = other RNA
gaccaagctccattaaactg

SEQ ID NO: 1962 - RNA, 20 nt, synthetic construct
  misc_feature 1..20: note = Synthetic
  source 1..20: mol_type = other RNA
gttgatccgggacaaaacta

SEQ ID NO: 1963 - RNA, 20 nt, synthetic construct
  misc_feature 1..20: note = Synthetic
  source 1..20: mol_type = other RNA
agtcatggggtagtgctcca

SEQ ID NO: 1964 - RNA, 20 nt, synthetic construct
  misc_feature 1..20: note = Synthetic
  source 1..20: mol_type = other RNA
aaccgggataaggctcttag

SEQ ID NO: 1965 - RNA, 20 nt, synthetic construct
  misc_feature 1..20: note = Synthetic
  source 1..20: mol_type = other RNA
ctagggtcatgtatttgccc

SEQ ID NO: 1966 - RNA, 20 nt, synthetic construct
  misc_feature 1..20: note = Synthetic
  source 1..20: mol_type = other RNA
gtgctcaacaatactgtagc

SEQ ID NO: 1967 - RNA, 20 nt, synthetic construct
  misc_feature 1..20: note = Synthetic
  source 1..20: mol_type = other RNA
gatgttgttctaccccgaga

SEQ ID NO: 1968 - RNA, 20 nt, synthetic construct
  misc_feature 1..20: note = Synthetic
  source 1..20: mol_type = other RNA
cagtttcagaggtcgggcaa

SEQ ID NO: 1969 - RNA, 20 nt, synthetic construct
  misc_feature 1..20: note = Synthetic
  source 1..20: mol_type = other RNA
cagtctctcttgagtatccg

SEQ ID NO: 1970 - RNA, 20 nt, synthetic construct
  misc_feature 1..20: note = Synthetic
  source 1..20: mol_type = other RNA
tcatgagtcgaaatagagac

SEQ ID NO: 1971 - RNA, 20 nt, synthetic construct
  misc_feature 1..20: note = Synthetic
  source 1..20: mol_type = other RNA
tcaagactctgaaagttcga

SEQ ID NO: 1972 - RNA, 20 nt, synthetic construct
  misc_feature 1..20: note = Synthetic
  source 1..20: mol_type = other RNA
gaccctgacacaattcaccc

SEQ ID NO: 1973 - RNA, 20 nt, synthetic construct
  misc_feature 1..20: note = Synthetic
  source 1..20: mol_type = other RNA
aatgaacactaggttgatcc

SEQ ID NO: 1974 - RNA, 20 nt, synthetic construct
  misc_feature 1..20: note = Synthetic
  source 1..20: mol_type = other RNA
ctatcttgcactgcttcaag

SEQ ID NO: 1975 - RNA, 20 nt, synthetic construct
  misc_feature 1..20: note = Synthetic
  source 1..20: mol_type = other RNA
ccttctcagtagtggtgcat

SEQ ID NO: 1976 - RNA, 20 nt, synthetic construct
  misc_feature 1..20: note = Synthetic
  source 1..20: mol_type = other RNA
caattggcactgtgacggtg

SEQ ID NO: 1977 - RNA, 20 nt, synthetic construct
  misc_feature 1..20: note = Synthetic
  source 1..20: mol_type = other RNA
tccagtacctacaccactgg

SEQ ID NO: 1978 - RNA, 20 nt, synthetic construct
  misc_feature 1..20: note = Synthetic
  source 1..20: mol_type = other RNA
tgtactgcgatcattcagac

SEQ ID NO: 1979 - RNA, 20 nt, synthetic construct
  misc_feature 1..20: note = Synthetic
  source 1..20: mol_type = other RNA
ttacgtttcttcgtgatcca

SEQ ID NO: 1980 - RNA, 20 nt, synthetic construct
  misc_feature 1..20: note = Synthetic
  source 1..20: mol_type = other RNA
gatggtggaaacggatgacc

SEQ ID NO: 1981 - RNA, 20 nt, synthetic construct
  misc_feature 1..20: note = Synthetic
  source 1..20: mol_type = other RNA
agagccttatcccggtttga

SEQ ID NO: 1982 - RNA, 20 nt, synthetic construct
  misc_feature 1..20: note = Synthetic
  source 1..20: mol_type = other RNA
ccaatgcaccactactgaga

SEQ ID NO: 1983 - RNA, 20 nt, synthetic construct
  misc_feature 1..20: note = Synthetic
  source 1..20: mol_type = other RNA
tgttttgctattgcgtcttg

SEQ ID NO: 1984 - RNA, 20 nt, synthetic construct
  misc_feature 1..20: note = Synthetic
  source 1..20: mol_type = other RNA
ttcaaaagcagaatcgcttg

SEQ ID NO: 1985 - RNA, 20 nt, synthetic construct
  misc_feature 1..20: note = Synthetic
  source 1..20: mol_type = other RNA
taactccactaaaccctgtt

SEQ ID NO: 1986 - RNA, 20 nt, synthetic construct
  misc_feature 1..20: note = Synthetic
  source 1..20: mol_type = other RNA
ctgccagggtgaattgtgtc

SEQ ID NO: 1987 - RNA, 20 nt, synthetic construct
  misc_feature 1..20: note = Synthetic
  source 1..20: mol_type = other RNA
tcttactgctgggcgaggta

SEQ ID NO: 1988 - RNA, 20 nt, synthetic construct
  misc_feature 1..20: note = Synthetic
  source 1..20: mol_type = other RNA
acccgaagaagaccttaaac

SEQ ID NO: 1989 - RNA, 20 nt, synthetic construct
  misc_feature 1..20: note = Synthetic
  source 1..20: mol_type = other RNA
acgcaacagtaacgttagtc

SEQ ID NO: 1990 - RNA, 20 nt, synthetic construct
  misc_feature 1..20: note = Synthetic
  source 1..20: mol_type = other RNA
gacctctaagagccttatcc

SEQ ID NO: 1991 - RNA, 20 nt, synthetic construct
  misc_feature 1..20: note = Synthetic
  source 1..20: mol_type = other RNA
tcggtgccatcaaatcatta

SEQ ID NO: 1992 - RNA, 20 nt, synthetic construct
  misc_feature 1..20: note = Synthetic
  source 1..20: mol_type = other RNA
agcctcagtttaatggagct

SEQ ID NO: 1993 - RNA, 20 nt, synthetic construct
  misc_feature 1..20: note = Synthetic
  source 1..20: mol_type = other RNA
gacagaaatgtccgccatgc

SEQ ID NO: 1994 - RNA, 20 nt, synthetic construct
  misc_feature 1..20: note = Synthetic
  source 1..20: mol_type = other RNA
tcagctctaacgtcacctac

SEQ ID NO: 1995 - RNA, 20 nt, synthetic construct
  misc_feature 1..20: note = Synthetic
  source 1..20: mol_type = other RNA
ctcatttggaccttaccaac

SEQ ID NO: 1996 - RNA, 20 nt, synthetic construct
  misc_feature 1..20: note = Synthetic
  source 1..20: mol_type = other RNA
acccaaaacacgctttgtaa

SEQ ID NO: 1997 - RNA, 20 nt, synthetic construct
  misc_feature 1..20: note = Synthetic
  source 1..20: mol_type = other RNA
actactacttcactataggc

SEQ ID NO: 1998 - RNA, 20 nt, synthetic construct
  misc_feature 1..20: note = Synthetic
  source 1..20: mol_type = other RNA
ggttgatccgggacaaaact

SEQ ID NO: 1999 - RNA, 20 nt, synthetic construct
  misc_feature 1..20: note = Synthetic
  source 1..20: mol_type = other RNA
cagaaagcttctttaccgac

SEQ ID NO: 2000 - RNA, 20 nt, synthetic construct
  misc_feature 1..20: note = Synthetic
  source 1..20: mol_type = other RNA
cttactgctgggcgaggtat

SEQ ID NO: 2001 - RNA, 20 nt, synthetic construct
  misc_feature 1..20: note = Synthetic
  source 1..20: mol_type = other RNA
ccggaagcttgttttactga

SEQ ID NO: 2002 - RNA, 20 nt, synthetic construct
  misc_feature 1..20: note = Synthetic
  source 1..20: mol_type = other RNA
accaccagtggtgtaggtac

SEQ ID NO: 2003 - RNA, 20 nt, synthetic construct
  misc_feature 1..20: note = Synthetic
  source 1..20: mol_type = other RNA
catttgaagacagcgaaagc

SEQ ID NO: 2004 - RNA, 20 nt, synthetic construct
  misc_feature 1..20: note = Synthetic
  source 1..20: mol_type = other RNA
gcggatcacacggaacagcg

SEQ ID NO: 2005 - RNA, 20 nt, synthetic construct
  misc_feature 1..20: note = Synthetic
  source 1..20: mol_type = other RNA
tatggaactgctgcgccccg

SEQ ID NO: 2006 - RNA, 20 nt, synthetic construct
  misc_feature 1..20: note = Synthetic
  source 1..20: mol_type = other RNA
gtgttggtgtcgttgaacgg

SEQ ID NO: 2007 - RNA, 20 nt, synthetic construct
  misc_feature 1..20: note = Synthetic
  source 1..20: mol_type = other RNA
gggacgccggacccactatg

SEQ ID NO: 2008 - RNA, 20 nt, synthetic construct
  misc_feature 1..20: note = Synthetic
  source 1..20: mol_type = other RNA
agggcactgtcccgattcga

SEQ ID NO: 2009 - RNA, 20 nt, synthetic construct
  misc_feature 1..20: note = Synthetic
  source 1..20: mol_type = other RNA
cgtcttccgcatcctgtgcg

SEQ ID NO: 2010 - RNA, 20 nt, synthetic construct
  misc_feature 1..20: note = Synthetic
  source 1..20: mol_type = other RNA
catggtatgccaacgacacg

SEQ ID NO: 2011 - RNA, 20 nt, synthetic construct
  misc_feature 1..20: note = Synthetic
  source 1..20: mol_type = other RNA
gttggtgtcgttgaacggcg

SEQ ID NO: 2012 - RNA, 20 nt, synthetic construct
  misc_feature 1..20: note = Synthetic
  source 1..20: mol_type = other RNA
tgtcctgcggctgatccgcg

SEQ ID NO: 2013 - RNA, 20 nt, synthetic construct
  misc_feature 1..20: note = Synthetic
  source 1..20: mol_type = other RNA
gatgaacatgctgaacagcg

SEQ ID NO: 2014 - RNA, 20 nt, synthetic construct
  misc_feature 1..20: note = Synthetic
  source 1..20: mol_type = other RNA
cgtgtcctgcggctgatccg

SEQ ID NO: 2015 - RNA, 20 nt, synthetic construct
  misc_feature 1..20: note = Synthetic
  source 1..20: mol_type = other RNA
gagggcactgtcccgattcg

SEQ ID NO: 2016 - RNA, 20 nt, synthetic construct
  misc_feature 1..20: note = Synthetic
  source 1..20: mol_type = other RNA
gacgagttcccatcatagag

SEQ ID NO: 2017 - RNA, 20 nt, synthetic construct
  misc_feature 1..20: note = Synthetic
  source 1..20: mol_type = other RNA
gcccaacttgatgcgcccga

SEQ ID NO: 2018 - RNA, 20 nt, synthetic construct
  misc_feature 1..20: note = Synthetic
  source 1..20: mol_type = other RNA
cagcctggacacatcgcaag

SEQ ID NO: 2019 - RNA, 20 nt, synthetic construct
  misc_feature 1..20: note = Synthetic
  source 1..20: mol_type = other RNA
tcagggctgaagacgatcgt

SEQ ID NO: 2020 - RNA, 20 nt, synthetic construct
  misc_feature 1..20: note = Synthetic
  source 1..20: mol_type = other RNA
cttcagcgtagtcaggcgcg

SEQ ID NO: 2021 - RNA, 20 nt, synthetic construct
  misc_feature 1..20: note = Synthetic
  source 1..20: mol_type = other RNA
ccgcgcctgactacgctgaa

SEQ ID NO: 2022 - RNA, 20 nt, synthetic construct
  misc_feature 1..20: note = Synthetic
  source 1..20: mol_type = other RNA
ctacggagaccccccgccgg

SEQ ID NO: 2023 - RNA, 20 nt, synthetic construct
  misc_feature 1..20: note = Synthetic
  source 1..20: mol_type = other RNA
gatctacggagaccccccgc

SEQ ID NO: 2024 - RNA, 20 nt, synthetic construct
  misc_feature 1..20: note = Synthetic
  source 1..20: mol_type = other RNA
cctgttcgagatcaccacgt

SEQ ID NO: 2025 - RNA, 20 nt, synthetic construct
  misc_feature 1..20: note = Synthetic
  source 1..20: mol_type = other RNA
cacgcccaatccgcgccagg

SEQ ID NO: 2026 - RNA, 20 nt, synthetic construct
  misc_feature 1..20: note = Synthetic
  source 1..20: mol_type = other RNA
gaagtggtggactctgcgca

SEQ ID NO: 2027 - RNA, 20 nt, synthetic construct
  misc_feature 1..20: note = Synthetic
  source 1..20: mol_type = other RNA
agctgactacaagccccccg

SEQ ID NO: 2028 - RNA, 20 nt, synthetic construct
  misc_feature 1..20: note = Synthetic
  source 1..20: mol_type = other RNA
cgacctggagatgcccaccg

SEQ ID NO: 2029 - RNA, 20 nt, synthetic construct
  misc_feature 1..20: note = Synthetic
  source 1..20: mol_type = other RNA
tcggactcctcggaggcgat

SEQ ID NO: 2030 - RNA, 20 nt, synthetic construct
  misc_feature 1..20: note = Synthetic
  source 1..20: mol_type = other RNA
gcgcggcaggttgcagtcca

SEQ ID NO: 2031 - RNA, 20 nt, synthetic construct
  misc_feature 1..20: note = Synthetic
  source 1..20: mol_type = other RNA
gcttttgtgtaccagacgga

SEQ ID NO: 2032 - RNA, 20 nt, synthetic construct
  misc_feature 1..20: note = Synthetic
  source 1..20: mol_type = other RNA
ctaggcctggccaacgtaca

SEQ ID NO: 2033 - RNA, 20 nt, synthetic construct
  misc_feature 1..20: note = Synthetic
  source 1..20: mol_type = other RNA
ccctacgagtatttccagca

SEQ ID NO: 2034 - RNA, 20 nt, synthetic construct
  misc_feature 1..20: note = Synthetic
  source 1..20: mol_type = other RNA
gatcgtcatggacccgttcg

SEQ ID NO: 2035 - RNA, 20 nt, synthetic construct
  misc_feature 1..20: note = Synthetic
  source 1..20: mol_type = other RNA
atgagtgcatcaagaccggg

SEQ ID NO: 2036 - RNA, 20 nt, synthetic construct
  misc_feature 1..20: note = Synthetic
  source 1..20: mol_type = other RNA
ccaatcaaaggtatcgttgg

SEQ ID NO: 2037 - RNA, 20 nt, synthetic construct
  misc_feature 1..20: note = Synthetic
  source 1..20: mol_type = other RNA
cgtgtcattgctgtaccacg

SEQ ID NO: 2038 - RNA, 20 nt, synthetic construct
  misc_feature 1..20: note = Synthetic
  source 1..20: mol_type = other RNA
gtcagggctgaagacgatcg

SEQ ID NO: 2039 - RNA, 20 nt, synthetic construct
  misc_feature 1..20: note = Synthetic
  source 1..20: mol_type = other RNA
ctcatcaagatactggcccg

SEQ ID NO: 2040 - RNA, 20 nt, synthetic construct
  misc_feature 1..20: note = Synthetic
  source 1..20: mol_type = other RNA
gggatgccgatgacctccgg

SEQ ID NO: 2041 - RNA, 20 nt, synthetic construct
  misc_feature 1..20: note = Synthetic
  source 1..20: mol_type = other RNA
gatgccgatgacctccggcg

SEQ ID NO: 2042 - RNA, 20 nt, synthetic construct
  misc_feature 1..20: note = Synthetic
  source 1..20: mol_type = other RNA
atgtaccgccacagccacga

SEQ ID NO: 2043 - RNA, 20 nt, synthetic construct
  misc_feature 1..20: note = Synthetic
  source 1..20: mol_type = other RNA
agatccagagggcctaccgc

SEQ ID NO: 2044 - RNA, 20 nt, synthetic construct
  misc_feature 1..20: note = Synthetic
  source 1..20: mol_type = other RNA
ttgggcttggcaatcctcag

SEQ ID NO: 2045 - RNA, 20 nt, synthetic construct
  misc_feature 1..20: note = Synthetic
  source 1..20: mol_type = other RNA
cggatcacacggaacagcgt

SEQ ID NO: 2046 - RNA, 20 nt, synthetic construct
  misc_feature 1..20: note = Synthetic
  source 1..20: mol_type = other RNA
cgaaggcctgcttcgtcacg

SEQ ID NO: 2047 - RNA, 20 nt, synthetic construct
  misc_feature 1..20: note = Synthetic
  source 1..20: mol_type = other RNA
cctatcccactatacttagg

SEQ ID NO: 2048 - RNA, 20 nt, synthetic construct
  misc_feature 1..20: note = Synthetic
  source 1..20: mol_type = other RNA
tgagaggttcgacatctccg

SEQ ID NO: 2049 - RNA, 20 nt, synthetic construct
  misc_feature 1..20: note = Synthetic
  source 1..20: mol_type = other RNA
gatgtcgaacctctcagagg

SEQ ID NO: 2050 - RNA, 20 nt, synthetic construct
  misc_feature 1..20: note = Synthetic
  source 1..20: mol_type = other RNA
gtcccgattcgagggcatga

SEQ ID NO: 2051 - RNA, 20 nt, synthetic construct
  misc_feature 1..20: note = Synthetic
  source 1..20: mol_type = other RNA
catctcgccatcctcatccg

SEQ ID NO: 2052 - RNA, 20 nt, synthetic construct
  misc_feature 1..20: note = Synthetic
  source 1..20: mol_type = other RNA
gtgcatctcaggccgactgg

SEQ ID NO: 2053 - RNA, 20 nt, synthetic construct
  misc_feature 1..20: note = Synthetic
  source 1..20: mol_type = other RNA
agttcgcacctggatcactg

SEQ ID NO: 2054 - RNA, 20 nt, synthetic construct
  misc_feature 1..20: note = Synthetic
  source 1..20: mol_type = other RNA
agtcggcgagatcttcactg

SEQ ID NO: 2055 - RNA, 20 nt, synthetic construct
  misc_feature 1..20: note = Synthetic
  source 1..20: mol_type = other RNA
gatgaggccctctcgctcag

SEQ ID NO: 2056 - RNA, 20 nt, synthetic construct
  misc_feature 1..20: note = Synthetic
  source 1..20: mol_type = other RNA
tcgacatacttggtccaggg

SEQ ID NO: 2057 - RNA, 20 nt, synthetic construct
  misc_feature 1..20: note = Synthetic
  source 1..20: mol_type = other RNA
agcgataacctccaggtgcg

SEQ ID NO: 2058 - RNA, 20 nt, synthetic construct
  misc_feature 1..20: note = Synthetic
  source 1..20: mol_type = other RNA
ccgcacctggaggttatcgc

SEQ ID NO: 2059 - RNA, 20 nt, synthetic construct
  misc_feature 1..20: note = Synthetic
  source 1..20: mol_type = other RNA
actccggcgcaagcacgaag

SEQ ID NO: 2060 - RNA, 20 nt, synthetic construct
  misc_feature 1..20: note = Synthetic
  source 1..20: mol_type = other RNA
ttcgtgcttgcgccggagtg

SEQ ID NO: 2061 - RNA, 20 nt, synthetic construct
  misc_feature 1..20: note = Synthetic
  source 1..20: mol_type = other RNA
acttgtatacccacccacga

SEQ ID NO: 2062 - RNA, 20 nt, synthetic construct
  misc_feature 1..20: note = Synthetic
  source 1..20: mol_type = other RNA
gtggtgtccaccgcacagca

SEQ ID NO: 2063 - RNA, 20 nt, synthetic construct
  misc_feature 1..20: note = Synthetic
  source 1..20: mol_type = other RNA
tgggcgagacggttccagca

SEQ ID NO: 2064 - RNA, 20 nt, synthetic construct
  misc_feature 1..20: note = Synthetic
  source 1..20: mol_type = other RNA
atctacacacggagcctggg

SEQ ID NO: 2065 - RNA, 20 nt, synthetic construct
  misc_feature 1..20: note = Synthetic
  source 1..20: mol_type = other RNA
cttccaccccatccggagag

SEQ ID NO: 2066 - RNA, 20 nt, synthetic construct
  misc_feature 1..20: note = Synthetic
  source 1..20: mol_type = other RNA
ccaacagcaatggctctcgg

SEQ ID NO: 2067 - RNA, 20 nt, synthetic construct
  misc_feature 1..20: note = Synthetic
  source 1..20: mol_type = other RNA
ctgtggatgtccatcaagca

SEQ ID NO: 2068 - RNA, 20 nt, synthetic construct
  misc_feature 1..20: note = Synthetic
  source 1..20: mol_type = other RNA
atgctcccgcggctggaacg

SEQ ID NO: 2069 - RNA, 20 nt, synthetic construct
  misc_feature 1..20: note = Synthetic
  source 1..20: mol_type = other RNA
cgtggtcgcaatggcctatg

SEQ ID NO: 2070 - RNA, 20 nt, synthetic construct
  misc_feature 1..20: note = Synthetic
  source 1..20: mol_type = other RNA
tggctgcaggacatgtccgg

SEQ ID NO: 2071 - RNA, 20 nt, synthetic construct
  misc_feature 1..20: note = Synthetic
  source 1..20: mol_type = other RNA
cggcaccaacggctccgtgg

SEQ ID NO: 2072 - RNA, 20 nt, synthetic construct
  misc_feature 1..20: note = Synthetic
  source 1..20: mol_type = other RNA
ccaggccgaggctcacacga

SEQ ID NO: 2073 - RNA, 20 nt, synthetic construct
  misc_feature 1..20: note = Synthetic
  source 1..20: mol_type = other RNA
cacctggaggttatcgctgg

SEQ ID NO: 2074 - RNA, 20 nt, synthetic construct
  misc_feature 1..20: note = Synthetic
  source 1..20: mol_type = other RNA
tggggaccgcatccattgca

SEQ ID NO: 2075 - RNA, 20 nt, synthetic construct
  misc_feature 1..20: note = Synthetic
  source 1..20: mol_type = other RNA
cgcatcctcagactgatccg

SEQ ID NO: 2076 - RNA, 20 nt, synthetic construct
  misc_feature 1..20: note = Synthetic
  source 1..20: mol_type = other RNA
gcgagacggttccagcatgg

SEQ ID NO: 2077 - RNA, 20 nt, synthetic construct
  misc_feature 1..20: note = Synthetic
  source 1..20: mol_type = other RNA
actcttccgcctgatgacgc

SEQ ID NO: 2078 - RNA, 20 nt, synthetic construct
  misc_feature 1..20: note = Synthetic
  source 1..20: mol_type = other RNA
tttaggcaccggtagccctc

SEQ ID NO: 2079 - RNA, 20 nt, synthetic construct
  misc_feature 1..20: note = Synthetic
  source 1..20: mol_type = other RNA
caacggcaccaacggctccg

SEQ ID NO: 2080 - RNA, 20 nt, synthetic construct
  misc_feature 1..20: note = Synthetic
  source 1..20: mol_type = other RNA
atggcggtgaaggtgtacct

SEQ ID NO: 2081 - RNA, 20 nt, synthetic construct
  misc_feature 1..20: note = Synthetic
  source 1..20: mol_type = other RNA
cactcgacatacttggtcca

SEQ ID NO: 2082 - RNA, 20 nt, synthetic construct
  misc_feature 1..20: note = Synthetic
  source 1..20: mol_type = other RNA
aggctcacacgatggactca

SEQ ID NO: 2083 - RNA, 20 nt, synthetic construct
  misc_feature 1..20: note = Synthetic
  source 1..20: mol_type = other RNA
gatgactcggaagagcgtcg

SEQ ID NO: 2084 - RNA, 20 nt, synthetic construct
  misc_feature 1..20: note = Synthetic
  source 1..20: mol_type = other RNA
cggagaattgtactggacca

SEQ ID NO: 2085 - RNA, 20 nt, synthetic construct
  misc_feature 1..20: note = Synthetic
  source 1..20: mol_type = other RNA
tcccaaacttccccgcaaag

SEQ ID NO: 2086 - RNA, 20 nt, synthetic construct
  misc_feature 1..20: note = Synthetic
  source 1..20: mol_type = other RNA
tgggccccatcaagtcactg

SEQ ID NO: 2087 - RNA, 20 nt, synthetic construct
  misc_feature 1..20: note = Synthetic
  source 1..20: mol_type = other RNA
cttcgaggacatctacctag

SEQ ID NO: 2088 - RNA, 20 nt, synthetic construct
  misc_feature 1..20: note = Synthetic
  source 1..20: mol_type = other RNA
caagacctgctaccacatcg

SEQ ID NO: 2089 - RNA, 20 nt, synthetic construct
  misc_feature 1..20: note = Synthetic
  source 1..20: mol_type = other RNA
gtgctccacgatgtggtagc

SEQ ID NO: 2090 - RNA, 20 nt, synthetic construct
  misc_feature 1..20: note = Synthetic
  source 1..20: mol_type = other RNA
cattacctcaccgcaccctg

SEQ ID NO: 2091 - RNA, 20 nt, synthetic construct
  misc_feature 1..20: note = Synthetic
  source 1..20: mol_type = other RNA
ccctactactacttccaaca

SEQ ID NO: 2092 - RNA, 20 nt, synthetic construct
  misc_feature 1..20: note = Synthetic
  source 1..20: mol_type = other RNA
tccgtgtgtagatggcttcg

SEQ ID NO: 2093 - RNA, 20 nt, synthetic construct
  misc_feature 1..20: note = Synthetic
  source 1..20: mol_type = other RNA
tcctcgaagccatctacaca

SEQ ID NO: 2094 - RNA, 20 nt, synthetic construct
  misc_feature 1..20: note = Synthetic
  source 1..20: mol_type = other RNA
cactcagaccacgccatcgg

SEQ ID NO: 2095 - RNA, 20 nt, synthetic construct
  misc_feature 1..20: note = Synthetic
  source 1..20: mol_type = other RNA
gctagagcacccgccagaca

SEQ ID NO: 2096 - RNA, 20 nt, synthetic construct
  misc_feature 1..20: note = Synthetic
  source 1..20: mol_type = other RNA
ggagggctaccggtgcctaa

SEQ ID NO: 2097 - RNA, 20 nt, synthetic construct
  misc_feature 1..20: note = Synthetic
  source 1..20: mol_type = other RNA
cgcaacttcacagcgctcaa

SEQ ID NO: 2098 - RNA, 20 nt, synthetic construct
  misc_feature 1..20: note = Synthetic
  source 1..20: mol_type = other RNA
ctctgccatgcgcttctcga

SEQ ID NO: 2099 - RNA, 20 nt, synthetic construct
  misc_feature 1..20: note = Synthetic
  source 1..20: mol_type = other RNA
tgtagtcagacccccgcacc

SEQ ID NO: 2100 - RNA, 20 nt, synthetic construct
  misc_feature 1..20: note = Synthetic
  source 1..20: mol_type = other RNA
tgtctttcgagtgttgtgcg

SEQ ID NO: 2101 - RNA, 20 nt, synthetic construct
  misc_feature 1..20: note = Synthetic
  source 1..20: mol_type = other RNA
cgtgaagcgcaacagcacgg

SEQ ID NO: 2102 - RNA, 20 nt, synthetic construct
  misc_feature 1..20: note = Synthetic
  source 1..20: mol_type = other RNA
ctcctgcttgcgacgcagtg

SEQ ID NO: 2103 - RNA, 20 nt, synthetic construct
  misc_feature 1..20: note = Synthetic
  source 1..20: mol_type = other RNA
tctgtccttccgcccgtagg

SEQ ID NO: 2104 - RNA, 20 nt, synthetic construct
  misc_feature 1..20: note = Synthetic
  source 1..20: mol_type = other RNA
gcagatggaagagcggttcg

SEQ ID NO: 2105 - RNA, 20 nt, synthetic construct
  misc_feature 1..20: note = Synthetic
  source 1..20: mol_type = other RNA
ctgagtctagcagacgtgga

SEQ ID NO: 2106 - RNA, 20 nt, synthetic construct
  misc_feature 1..20: note = Synthetic
  source 1..20: mol_type = other RNA
gtacccgtacagtcaagttg

SEQ ID NO: 2107 - RNA, 20 nt, synthetic construct
  misc_feature 1..20: note = Synthetic
  source 1..20: mol_type = other RNA
gtcctgcagcgtgcctaccg

SEQ ID NO: 2108 - RNA, 20 nt, synthetic construct
  misc_feature 1..20: note = Synthetic
  source 1..20: mol_type = other RNA
gaacagctgcagtccgatca

SEQ ID NO: 2109 - RNA, 20 nt, synthetic construct
  misc_feature 1..20: note = Synthetic
  source 1..20: mol_type = other RNA
cgcggatgacgagcacagca

SEQ ID NO: 2110 - RNA, 20 nt, synthetic construct
  misc_feature 1..20: note = Synthetic
  source 1..20: mol_type = other RNA
cagctaccgatgacagtgta

SEQ ID NO: 2111 - RNA, 20 nt, synthetic construct
  misc_feature 1..20: note = Synthetic
  source 1..20: mol_type = other RNA
attccggtggatgtctgcac

SEQ ID NO: 2112 - RNA, 20 nt, synthetic construct
  misc_feature 1..20: note = Synthetic
  source 1..20: mol_type = other RNA
gggtacccgtacagtcaagt

SEQ ID NO: 2113 - RNA, 20 nt, synthetic construct
  misc_feature 1..20: note = Synthetic
  source 1..20: mol_type = other RNA
acctagttccgagtagccca

SEQ ID NO: 2114 - RNA, 20 nt, synthetic construct
  misc_feature 1..20: note = Synthetic
  source 1..20: mol_type = other RNA
gagtttgcctttcatctacg

SEQ ID NO: 2115 - RNA, 20 nt, synthetic construct
  misc_feature 1..20: note = Synthetic
  source 1..20: mol_type = other RNA
gattctgtccttccgcccgt

SEQ ID NO: 2116 - RNA, 20 nt, synthetic construct
  misc_feature 1..20: note = Synthetic
  source 1..20: mol_type = other RNA
ggtacccgtacagtcaagtt

SEQ ID NO: 2117 - RNA, 20 nt, synthetic construct
  misc_feature 1..20: note = Synthetic
  source 1..20: mol_type = other RNA
gtgctgccaggtcaacatcg

SEQ ID NO: 2118 - RNA, 20 nt, synthetic construct
  misc_feature 1..20: note = Synthetic
  source 1..20: mol_type = other RNA
tgcagctgtagattcccgga

SEQ ID NO: 2119 - RNA, 20 nt, synthetic construct
  misc_feature 1..20: note = Synthetic
  source 1..20: mol_type = other RNA
accggggacatttggcaagg

SEQ ID NO: 2120 - RNA, 20 nt, synthetic construct
  misc_feature 1..20: note = Synthetic
  source 1..20: mol_type = other RNA
gggatgtccccgtagatgaa

SEQ ID NO: 2121 - RNA, 20 nt, synthetic construct
  misc_feature 1..20: note = Synthetic
  source 1..20: mol_type = other RNA
tcctgactggtcgaagaatg

SEQ ID NO: 2122 - RNA, 20 nt, synthetic construct
  misc_feature 1..20: note = Synthetic
  source 1..20: mol_type = other RNA
caggagacgcccgccgatgt

SEQ ID NO: 2123 - RNA, 20 nt, synthetic construct
  misc_feature 1..20: note = Synthetic
  source 1..20: mol_type = other RNA
accaattagcctcctacggg

SEQ ID NO: 2124 - RNA, 20 nt, synthetic construct
  misc_feature 1..20: note = Synthetic
  source 1..20: mol_type = other RNA
attagcctcctacgggcgga

SEQ ID NO: 2125 - RNA, 20 nt, synthetic construct
  misc_feature 1..20: note = Synthetic
  source 1..20: mol_type = other RNA
ggcccactttaagcagcgtg

SEQ ID NO: 2126 - RNA, 20 nt, synthetic construct
  misc_feature 1..20: note = Synthetic
  source 1..20: mol_type = other RNA
gccctgggctactcggaact

SEQ ID NO: 2127 - RNA, 20 nt, synthetic construct
  misc_feature 1..20: note = Synthetic
  source 1..20: mol_type = other RNA
gcctagataaggaacaccca

SEQ ID NO: 2128 - RNA, 20 nt, synthetic construct
  misc_feature 1..20: note = Synthetic
  source 1..20: mol_type = other RNA
caatgaactgggtggcatcg

SEQ ID NO: 2129 - RNA, 20 nt, synthetic construct
  misc_feature 1..20: note = Synthetic
  source 1..20: mol_type = other RNA
aaccacactgcgtcgcaagc

SEQ ID NO: 2130 - RNA, 20 nt, synthetic construct
  misc_feature 1..20: note = Synthetic
  source 1..20: mol_type = other RNA
gtgcaaaggaaagacgtaac

SEQ ID NO: 2131 - RNA, 20 nt, synthetic construct
  misc_feature 1..20: note = Synthetic
  source 1..20: mol_type = other RNA
gtagctgctccggcgctcgc

SEQ ID NO: 2132 - RNA, 20 nt, synthetic construct
  misc_feature 1..20: note = Synthetic
  source 1..20: mol_type = other RNA
tgtagctgctccggcgctcg

SEQ ID NO: 2133 - RNA, 20 nt, synthetic construct
  misc_feature 1..20: note = Synthetic
  source 1..20: mol_type = other RNA
ggcgtggtgtccctcatcgg

SEQ ID NO: 2134 - RNA, 20 nt, synthetic construct
  misc_feature 1..20: note = Synthetic
  source 1..20: mol_type = other RNA
gtaggaggctaattggtcca

SEQ ID NO: 2135 - RNA, 20 nt, synthetic construct
  misc_feature 1..20: note = Synthetic
  source 1..20: mol_type = other RNA
actgagtctagcagacgtgg

SEQ ID NO: 2136 - RNA, 20 nt, synthetic construct
  misc_feature 1..20: note = Synthetic
  source 1..20: mol_type = other RNA
gtgtgtctgcaagatcaacc

SEQ ID NO: 2137 - RNA, 20 nt, synthetic construct
  misc_feature 1..20: note = Synthetic
  source 1..20: mol_type = other RNA
agtcatgcatatgccagcga

SEQ ID NO: 2138 - RNA, 20 nt, synthetic construct
  misc_feature 1..20: note = Synthetic
  source 1..20: mol_type = other RNA
tcagtgatccgtatcaagaa

SEQ ID NO: 2139 - RNA, 20 nt, synthetic construct
  misc_feature 1..20: note = Synthetic
  source 1..20: mol_type = other RNA
aactgtatcgccaatcacac

SEQ ID NO: 2140 - RNA, 20 nt, synthetic construct
  misc_feature 1..20: note = Synthetic
  source 1..20: mol_type = other RNA
ggtgcagacatccaccggaa

SEQ ID NO: 2141 - RNA, 20 nt, synthetic construct
  misc_feature 1..20: note = Synthetic
  source 1..20: mol_type = other RNA
agcagcgagtcggatcctga

SEQ ID NO: 2142 - RNA, 20 nt, synthetic construct
  misc_feature 1..20: note = Synthetic
  source 1..20: mol_type = other RNA
gagcagggtacgaatccctt

SEQ ID NO: 2143 - RNA, 20 nt, synthetic construct
  misc_feature 1..20: note = Synthetic
  source 1..20: mol_type = other RNA
agcctagataaggaacaccc

SEQ ID NO: 2144 - RNA, 20 nt, synthetic construct
  misc_feature 1..20: note = Synthetic
  source 1..20: mol_type = other RNA
tgactgccatcggcctttgg

SEQ ID NO: 2145 - RNA, 20 nt, synthetic construct
  misc_feature 1..20: note = Synthetic
  source 1..20: mol_type = other RNA
gtcctcccgatgactgccat

SEQ ID NO: 2146 - RNA, 20 nt, synthetic construct
  misc_feature 1..20: note = Synthetic
  source 1..20: mol_type = other RNA
acattcttcgaccagtcagg

SEQ ID NO: 2147 - RNA, 20 nt, synthetic construct
  misc_feature 1..20: note = Synthetic
  source 1..20: mol_type = other RNA
tctgttgtctggcagccgaa

SEQ ID NO: 2148 - RNA, 20 nt, synthetic construct
  misc_feature 1..20: note = Synthetic
  source 1..20: mol_type = other RNA
aggaaaccgtgacccatctg

SEQ ID NO: 2149 - RNA, 20 nt, synthetic construct
  misc_feature 1..20: note = Synthetic
  source 1..20: mol_type = other RNA
ggctgagcgtccatcaacca

SEQ ID NO: 2150 - RNA, 20 nt, synthetic construct
  misc_feature 1..20: note = Synthetic
  source 1..20: mol_type = other RNA
ataggcgagcacatgaaaag

SEQ ID NO: 2151 - RNA, 20 nt, synthetic construct
  misc_feature 1..20: note = Synthetic
  source 1..20: mol_type = other RNA
tatgcccttcgacaccaagg

SEQ ID NO: 2152 - RNA, 20 nt, synthetic construct
  misc_feature 1..20: note = Synthetic
  source 1..20: mol_type = other RNA
cgtgtgtagtcagtgtccag

SEQ ID NO: 2153 - RNA, 20 nt, synthetic construct
  misc_feature 1..20: note = Synthetic
  source 1..20: mol_type = other RNA
cgaatcctacgtctagtcaa

SEQ ID NO: 2154 - RNA, 20 nt, synthetic construct
  misc_feature 1..20: note = Synthetic
  source 1..20: mol_type = other RNA
aaagccaattcctcgaccag

SEQ ID NO: 2155 - RNA, 20 nt, synthetic construct
  misc_feature 1..20: note = Synthetic
  source 1..20: mol_type = other RNA
gtgtccgaagggatttaatg

SEQ ID NO: 2156 - RNA, 20 nt, synthetic construct
  misc_feature 1..20: note = Synthetic
  source 1..20: mol_type = other RNA
gtcgttgtgaatgcactcat

SEQ ID NO: 2157 - RNA, 20 nt, synthetic construct
  misc_feature 1..20: note = Synthetic
  source 1..20: mol_type = other RNA
ttgggtcattagcctaaaca

SEQ ID NO: 2158 - RNA, 20 nt, synthetic construct
  misc_feature 1..20: note = Synthetic
  source 1..20: mol_type = other RNA
ccaccaatgctgccggtgaa

SEQ ID NO: 2159 - RNA, 20 nt, synthetic construct
  misc_feature 1..20: note = Synthetic
  source 1..20: mol_type = other RNA
ccgttcaccggcagcattgg

SEQ ID NO: 2160 - RNA, 20 nt, synthetic construct
  misc_feature 1..20: note = Synthetic
  source 1..20: mol_type = other RNA
gttcaccggcagcattggtg

SEQ ID NO: 2161 - RNA, 20 nt, synthetic construct
  misc_feature 1..20: note = Synthetic
  source 1..20: mol_type = other RNA
cttatagacgttaccgctta

SEQ ID NO: 2162 - RNA, 20 nt, synthetic construct
  misc_feature 1..20: note = Synthetic
  source 1..20: mol_type = other RNA
gccaagttaacatagagtca

SEQ ID NO: 2163 - RNA, 20 nt, synthetic construct
  misc_feature 1..20: note = Synthetic
  source 1..20: mol_type = other RNA
tgacagtgccaattgcacct

SEQ ID NO: 2164 - RNA, 20 nt, synthetic construct
  misc_feature 1..20: note = Synthetic
  source 1..20: mol_type = other RNA
gggctgagcgtccatcaacc

SEQ ID NO: 2165 - RNA, 20 nt, synthetic construct
  misc_feature 1..20: note = Synthetic
  source 1..20: mol_type = other RNA
gaggttgtctacccccaatc

SEQ ID NO: 2166 - RNA, 20 nt, synthetic construct
  misc_feature 1..20: note = Synthetic
  source 1..20: mol_type = other RNA
tcacttttcttcgtgacccg

SEQ ID NO: 2167 - RNA, 20 nt, synthetic construct
  misc_feature 1..20: note = Synthetic
  source 1..20: mol_type = other RNA
ccatgaataacccaccggac

SEQ ID NO: 2168 - RNA, 20 nt, synthetic construct
  misc_feature 1..20: note = Synthetic
  source 1..20: mol_type = other RNA
ccagtccggtgggttattca

SEQ ID NO: 2169 - RNA, 20 nt, synthetic construct
  misc_feature 1..20: note = Synthetic
  source 1..20: mol_type = other RNA
cagcaatgcgttgttcaatg

SEQ ID NO: 2170 - RNA, 20 nt, synthetic construct
  misc_feature 1..20: note = Synthetic
  source 1..20: mol_type = other RNA
atgttagtcaaaatgtgcga

SEQ ID NO: 2171 - RNA, 20 nt, synthetic construct
  misc_feature 1..20: note = Synthetic
  source 1..20: mol_type = other RNA
taaagctctcagtgtccgaa

SEQ ID NO: 2172 - RNA, 20 nt, synthetic construct
  misc_feature 1..20: note = Synthetic
  source 1..20: mol_type = other RNA
ctgtgcattttcccgttcac

SEQ ID NO: 2173 - RNA, 20 nt, synthetic construct
  misc_feature 1..20: note = Synthetic
  source 1..20: mol_type = other RNA
cgttcaccggcagcattggt

SEQ ID NO: 2174 - RNA, 20 nt, synthetic construct
  misc_feature 1..20: note = Synthetic
  source 1..20: mol_type = other RNA
tgttactgctgcgtcgctcc

SEQ ID NO: 2175 - RNA, 20 nt, synthetic construct
  misc_feature 1..20: note = Synthetic
  source 1..20: mol_type = other RNA
gttactgctgcgtcgctcct

SEQ ID NO: 2176 - RNA, 20 nt, synthetic construct
  misc_feature 1..20: note = Synthetic
  source 1..20: mol_type = other RNA
ttactgctgcgtcgctcctg

SEQ ID NO: 2177 - RNA, 20 nt, synthetic construct
  misc_feature 1..20: note = Synthetic
  source 1..20: mol_type = other RNA
accttggtgtcgaagggcat

SEQ ID NO: 2178 - RNA, 20 nt, synthetic construct
  misc_feature 1..20: note = Synthetic
  source 1..20: mol_type = other RNA
agtgtattaacaccacagat

SEQ ID NO: 2179 - RNA, 20 nt, synthetic construct
  misc_feature 1..20: note = Synthetic
  source 1..20: mol_type = other RNA
ttaaagctctcagtgtccga

SEQ ID NO: 2180 - RNA, 20 nt, synthetic construct
  misc_feature 1..20: note = Synthetic
  source 1..20: mol_type = other RNA
agttctgcgatcattcagac

SEQ ID NO: 2181 - RNA, 20 nt, synthetic construct
  misc_feature 1..20: note = Synthetic
  source 1..20: mol_type = other RNA
gtttccaccttggtgtcgaa

SEQ ID NO: 2182 - RNA, 20 nt, synthetic construct
  misc_feature 1..20: note = Synthetic
  source 1..20: mol_type = other RNA
tcgacatttttggtccagtc

SEQ ID NO: 2183 - RNA, 20 nt, synthetic construct
  misc_feature 1..20: note = Synthetic
  source 1..20: mol_type = other RNA
ttgctcctttgactagacgt

SEQ ID NO: 2184 - RNA, 20 nt, synthetic construct
  misc_feature 1..20: note = Synthetic
  source 1..20: mol_type = other RNA
aaaagccaattcctcgacca

SEQ ID NO: 2185 - RNA, 20 nt, synthetic construct
  misc_feature 1..20: note = Synthetic
  source 1..20: mol_type = other RNA
gcaaaacattcggaacgatt

SEQ ID NO: 2186 - RNA, 20 nt, synthetic construct
  misc_feature 1..20: note = Synthetic
  source 1..20: mol_type = other RNA
tatgaattccgatgagccag

SEQ ID NO: 2187 - RNA, 20 nt, synthetic construct
  misc_feature 1..20: note = Synthetic
  source 1..20: mol_type = other RNA
agtttccaccttggtgtcga

SEQ ID NO: 2188 - RNA, 20 nt, synthetic construct
  misc_feature 1..20: note = Synthetic
  source 1..20: mol_type = other RNA
gcctatgcccttcgacacca

SEQ ID NO: 2189 - RNA, 20 nt, synthetic construct
  misc_feature 1..20: note = Synthetic
  source 1..20: mol_type = other RNA
agctcgtgtagccataatca

SEQ ID NO: 2190 - RNA, 20 nt, synthetic construct
  misc_feature 1..20: note = Synthetic
  source 1..20: mol_type = other RNA
tcgtgacccgtggaactggc

SEQ ID NO: 2191 - RNA, 20 nt, synthetic construct
  misc_feature 1..20: note = Synthetic
  source 1..20: mol_type = other RNA
acatttttggtccagtccgg

SEQ ID NO: 2192 - RNA, 20 nt, synthetic construct
  misc_feature 1..20: note = Synthetic
  source 1..20: mol_type = other RNA
actactacttcactgtagga

SEQ ID NO: 2193 - RNA, 20 nt, synthetic construct
  misc_feature 1..20: note = Synthetic
  source 1..20: mol_type = other RNA
ctaggtcaaatatacatcct

SEQ ID NO: 2194 - RNA, 20 nt, synthetic construct
  misc_feature 1..20: note = Synthetic
  source 1..20: mol_type = other RNA
tctggctcatcggaattcat

SEQ ID NO: 2195 - RNA, 20 nt, synthetic construct
  misc_feature 1..20: note = Synthetic
  source 1..20: mol_type = other RNA
ttttccaaatcggattcccc

SEQ ID NO: 2196 - RNA, 20 nt, synthetic construct
  misc_feature 1..20: note = Synthetic
  source 1..20: mol_type = other RNA
gtgacactctcataggacgg

SEQ ID NO: 2197 - RNA, 20 nt, synthetic construct
  misc_feature 1..20: note = Synthetic
  source 1..20: mol_type = other RNA
tagtttcgagggatccaatg

SEQ ID NO: 2198 - RNA, 20 nt, synthetic construct
  misc_feature 1..20: note = Synthetic
  source 1..20: mol_type = other RNA
ttcgaacccttcgcgctctg

SEQ ID NO: 2199 - RNA, 20 nt, synthetic construct
  misc_feature 1..20: note = Synthetic
  source 1..20: mol_type = other RNA
tcatcgctaatccgactgtg

SEQ ID NO: 2200 - RNA, 20 nt, synthetic construct
  misc_feature 1..20: note = Synthetic
  source 1..20: mol_type = other RNA
tgtagtcaccatggcgtatg

SEQ ID NO: 2201 - RNA, 20 nt, synthetic construct
  misc_feature 1..20: note = Synthetic
  source 1..20: mol_type = other RNA
gtgactccggagtaaagcga

SEQ ID NO: 2202 - RNA, 20 nt, synthetic construct
  misc_feature 1..20: note = Synthetic
  source 1..20: mol_type = other RNA
caagacttgctaccgtatcg

SEQ ID NO: 2203 - RNA, 20 nt, synthetic construct
  misc_feature 1..20: note = Synthetic
  source 1..20: mol_type = other RNA
gcacttaccctcaaggacgg

SEQ ID NO: 2204 - RNA, 20 nt, synthetic construct
  misc_feature 1..20: note = Synthetic
  source 1..20: mol_type = other RNA
ctatgtgctgcaccgctcca

SEQ ID NO: 2205 - RNA, 20 nt, synthetic construct
  misc_feature 1..20: note = Synthetic
  source 1..20: mol_type = other RNA
gaatgtcctaggagaatccg

SEQ ID NO: 2206 - RNA, 20 nt, synthetic construct
  misc_feature 1..20: note = Synthetic
  source 1..20: mol_type = other RNA
gcacagcaatagatctccgt

SEQ ID NO: 2207 - RNA, 20 nt, synthetic construct
  misc_feature 1..20: note = Synthetic
  source 1..20: mol_type = other RNA
ggcacagcaatagatctccg

SEQ ID NO: 2208 - RNA, 20 nt, synthetic construct
  misc_feature 1..20: note = Synthetic
  source 1..20: mol_type = other RNA
ggggcaagctcactagtggg

SEQ ID NO: 2209 - RNA, 20 nt, synthetic construct
  misc_feature 1..20: note = Synthetic
  source 1..20: mol_type = other RNA
actagcccggcgttttccag

SEQ ID NO: 2210 - RNA, 20 nt, synthetic construct
  misc_feature 1..20: note = Synthetic
  source 1..20: mol_type = other RNA
aggttaaaggtgatccattg

SEQ ID NO: 2211 - RNA, 20 nt, synthetic construct
  misc_feature 1..20: note = Synthetic
  source 1..20: mol_type = other RNA
gctcccagcagaactgatcg

SEQ ID NO: 2212 - RNA, 20 nt, synthetic construct
  misc_feature 1..20: note = Synthetic
  source 1..20: mol_type = other RNA
aggctggagtgttctcacta

SEQ ID NO: 2213 - RNA, 20 nt, synthetic construct
  misc_feature 1..20: note = Synthetic
  source 1..20: mol_type = other RNA
tgacactctcataggacggt

SEQ ID NO: 2214 - RNA, 20 nt, synthetic construct
  misc_feature 1..20: note = Synthetic
  source 1..20: mol_type = other RNA
gtgcagcacatagctccgat

SEQ ID NO: 2215 - RNA, 20 nt, synthetic construct
  misc_feature 1..20: note = Synthetic
  source 1..20: mol_type = other RNA
ttcttgcttccatcggagag

SEQ ID NO: 2216 - RNA, 20 nt, synthetic construct
  misc_feature 1..20: note = Synthetic
  source 1..20: mol_type = other RNA
agactgatccgagcggccaa

SEQ ID NO: 2217 - RNA, 20 nt, synthetic construct
  misc_feature 1..20: note = Synthetic
  source 1..20: mol_type = other RNA
tgcagctgttgattcccggg

SEQ ID NO: 2218 - RNA, 20 nt, synthetic construct
  misc_feature 1..20: note = Synthetic
  source 1..20: mol_type = other RNA
ggataccaccaagagtccat

SEQ ID NO: 2219 - RNA, 20 nt, synthetic construct
  misc_feature 1..20: note = Synthetic
  source 1..20: mol_type = other RNA
catcgctaatccgactgtgt

SEQ ID NO: 2220 - RNA, 20 nt, synthetic construct
  misc_feature 1..20: note = Synthetic
  source 1..20: mol_type = other RNA
caccatcaccttgtgcatcg

SEQ ID NO: 2221 - RNA, 20 nt, synthetic construct
  misc_feature 1..20: note = Synthetic
  source 1..20: mol_type = other RNA
tctcaacaggcattcgatgc

SEQ ID NO: 2222 - RNA, 20 nt, synthetic construct
  misc_feature 1..20: note = Synthetic
  source 1..20: mol_type = other RNA
ggagaccacgaaagccatcg

SEQ ID NO: 2223 - RNA, 20 nt, synthetic construct
  misc_feature 1..20: note = Synthetic
  source 1..20: mol_type = other RNA
tggttgtaaggatcagagcg

SEQ ID NO: 2224 - RNA, 20 nt, synthetic construct
  misc_feature 1..20: note = Synthetic
  source 1..20: mol_type = other RNA
ggcccgagtggcactaaacc

SEQ ID NO: 2225 - RNA, 20 nt, synthetic construct
  misc_feature 1..20: note = Synthetic
  source 1..20: mol_type = other RNA
tccgttctacagcacacacc

SEQ ID NO: 2226 - RNA, 20 nt, synthetic construct
  misc_feature 1..20: note = Synthetic
  source 1..20: mol_type = other RNA
gtatggagctgattgcccct

SEQ ID NO: 2227 - RNA, 20 nt, synthetic construct
  misc_feature 1..20: note = Synthetic
  source 1..20: mol_type = other RNA
ggcaatcagctccatactgg

SEQ ID NO: 2228 - RNA, 20 nt, synthetic construct
  misc_feature 1..20: note = Synthetic
  source 1..20: mol_type = other RNA
aggtgcatcaactataccga

SEQ ID NO: 2229 - RNA, 20 nt, synthetic construct
  misc_feature 1..20: note = Synthetic
  source 1..20: mol_type = other RNA
cagtggccgcagagcgcgaa

SEQ ID NO: 2230 - RNA, 20 nt, synthetic construct
  misc_feature 1..20: note = Synthetic
  source 1..20: mol_type = other RNA
cagagcgcgaagggttcgaa

SEQ ID NO: 2231 - RNA, 20 nt, synthetic construct
  misc_feature 1..20: note = Synthetic
  source 1..20: mol_type = other RNA
cagcggggccagtcttcatg

SEQ ID NO: 2232 - RNA, 20 nt, synthetic construct
  misc_feature 1..20: note = Synthetic
  source 1..20: mol_type = other RNA
tgttacggtagttttcccct

SEQ ID NO: 2233 - RNA, 20 nt, synthetic construct
  misc_feature 1..20: note = Synthetic
  source 1..20: mol_type = other RNA
ggagcatggcttcgaaggta

SEQ ID NO: 2234 - RNA, 20 nt, synthetic construct
  misc_feature 1..20: note = Synthetic
  source 1..20: mol_type = other RNA
atcataacctccgtccttga

SEQ ID NO: 2235 - RNA, 20 nt, synthetic construct
  misc_feature 1..20: note = Synthetic
  source 1..20: mol_type = other RNA
gcaagctcactagtgggcgg

SEQ ID NO: 2236 - RNA, 20 nt, synthetic construct
  misc_feature 1..20: note = Synthetic
  source 1..20: mol_type = other RNA
gagtgagatatctcggccag

SEQ ID NO: 2237 - RNA, 20 nt, synthetic construct
  misc_feature 1..20: note = Synthetic
  source 1..20: mol_type = other RNA
gctccccgatcagttctgct

SEQ ID NO: 2238 - RNA, 20 nt, synthetic construct
  misc_feature 1..20: note = Synthetic
  source 1..20: mol_type = other RNA
gggagctcaccatagaactt

SEQ ID NO: 2239 - RNA, 20 nt, synthetic construct
  misc_feature 1..20: note = Synthetic
  source 1..20: mol_type = other RNA
caacttccgtcgctttactc

SEQ ID NO: 2240 - RNA, 20 nt, synthetic construct
  misc_feature 1..20: note = Synthetic
  source 1..20: mol_type = other RNA
ggtcaacatgcaacccaagt

SEQ ID NO: 2241 - RNA, 20 nt, synthetic construct
  misc_feature 1..20: note = Synthetic
  source 1..20: mol_type = other RNA
tcacaatcgacaaaggtaca

SEQ ID NO: 2242 - RNA, 20 nt, synthetic construct
  misc_feature 1..20: note = Synthetic
  source 1..20: mol_type = other RNA
cgagatgctgcttaagtggg

SEQ ID NO: 2243 - RNA, 20 nt, synthetic construct
  misc_feature 1..20: note = Synthetic
  source 1..20: mol_type = other RNA
ggttggcaagcagctcctag

SEQ ID NO: 2244 - RNA, 20 nt, synthetic construct
  misc_feature 1..20: note = Synthetic
  source 1..20: mol_type = other RNA
tccggactctacgagcactg

SEQ ID NO: 2245 - RNA, 20 nt, synthetic construct
  misc_feature 1..20: note = Synthetic
  source 1..20: mol_type = other RNA
ggtattccgcatcctctgcg

SEQ ID NO: 2246 - RNA, 20 nt, synthetic construct
  misc_feature 1..20: note = Synthetic
  source 1..20: mol_type = other RNA
ttcaccgctagggtactcgg

SEQ ID NO: 2247 - RNA, 20 nt, synthetic construct
  misc_feature 1..20: note = Synthetic
  source 1..20: mol_type = other RNA
ccaatcatgcctgacgccca

SEQ ID NO: 2248 - RNA, 20 nt, synthetic construct
  misc_feature 1..20: note = Synthetic
  source 1..20: mol_type = other RNA
tttacggcactggcacatgg

SEQ ID NO: 2249 - RNA, 20 nt, synthetic construct
  misc_feature 1..20: note = Synthetic
  source 1..20: mol_type = other RNA
agagccaccgagtaccctag

SEQ ID NO: 2250 - RNA, 20 nt, synthetic construct
  misc_feature 1..20: note = Synthetic
  source 1..20: mol_type = other RNA
ttcggccaatccgagccaag

SEQ ID NO: 2251 - RNA, 20 nt, synthetic construct
  misc_feature 1..20: note = Synthetic
  source 1..20: mol_type = other RNA
acaattctgaagagcgtcgg

SEQ ID NO: 2252 - RNA, 20 nt, synthetic construct
  misc_feature 1..20: note = Synthetic
  source 1..20: mol_type = other RNA
caattctgaagagcgtcgga

SEQ ID NO: 2253 - RNA, 20 nt, synthetic construct
  misc_feature 1..20: note = Synthetic
  source 1..20: mol_type = other RNA
ttaccacttgcagcagagcg

SEQ ID NO: 2254 - RNA, 20 nt, synthetic construct
  misc_feature 1..20: note = Synthetic
  source 1..20: mol_type = other RNA
cagtgctcgtagagtccgga

SEQ ID NO: 2255 - RNA, 20 nt, synthetic construct
  misc_feature 1..20: note = Synthetic
  source 1..20: mol_type = other RNA
agtagagcccagtagtacgc

SEQ ID NO: 2256 - RNA, 20 nt, synthetic construct
  misc_feature 1..20: note = Synthetic
  source 1..20: mol_type = other RNA
gtagagcccagtagtacgca

SEQ ID NO: 2257 - RNA, 20 nt, synthetic construct
  misc_feature 1..20: note = Synthetic
  source 1..20: mol_type = other RNA
gaagagctgctgacctacca

SEQ ID NO: 2258 - RNA, 20 nt, synthetic construct
  misc_feature 1..20: note = Synthetic
  source 1..20: mol_type = other RNA
aacacacggaaggtacgcag

SEQ ID NO: 2259 - RNA, 20 nt, synthetic construct
  misc_feature 1..20: note = Synthetic
  source 1..20: mol_type = other RNA
tgaagatcgcctccactgca

SEQ ID NO: 2260 - RNA, 20 nt, synthetic construct
  misc_feature 1..20: note = Synthetic
  source 1..20: mol_type = other RNA
gcgacatcatcagagcaaag

SEQ ID NO: 2261 - RNA, 20 nt, synthetic construct
  misc_feature 1..20: note = Synthetic
  source 1..20: mol_type = other RNA
gatgcggaataccactagga

SEQ ID NO: 2262 - RNA, 20 nt, synthetic construct
  misc_feature 1..20: note = Synthetic
  source 1..20: mol_type = other RNA
actgcgtgttcatggctaca

SEQ ID NO: 2263 - RNA, 20 nt, synthetic construct
  misc_feature 1..20: note = Synthetic
  source 1..20: mol_type = other RNA
attgtccgcttggctcggat

SEQ ID NO: 2264 - RNA, 20 nt, synthetic construct
  misc_feature 1..20: note = Synthetic
  source 1..20: mol_type = other RNA
tgtttacggcactggcacat

SEQ ID NO: 2265 - RNA, 20 nt, synthetic construct
  misc_feature 1..20: note = Synthetic
  source 1..20: mol_type = other RNA
ttgggtcatcagccggaaca

SEQ ID NO: 2266 - RNA, 20 nt, synthetic construct
  misc_feature 1..20: note = Synthetic
  source 1..20: mol_type = other RNA
cttcttcacagagcgtagca

SEQ ID NO: 2267 - RNA, 20 nt, synthetic construct
  misc_feature 1..20: note = Synthetic
  source 1..20: mol_type = other RNA
gaacacacggaaggtacgca

SEQ ID NO: 2268 - RNA, 20 nt, synthetic construct
  misc_feature 1..20: note = Synthetic
  source 1..20: mol_type = other RNA
ggttcatacaacttcttgag

SEQ ID NO: 2269 - RNA, 20 nt, synthetic construct
  misc_feature 1..20: note = Synthetic
  source 1..20: mol_type = other RNA
cggacaattctgaagagcgt

SEQ ID NO: 2270 - RNA, 20 nt, synthetic construct
  misc_feature 1..20: note = Synthetic
  source 1..20: mol_type = other RNA
gtggtggtcaatgctctcat

SEQ ID NO: 2271 - RNA, 20 nt, synthetic construct
  misc_feature 1..20: note = Synthetic
  source 1..20: mol_type = other RNA
aactgggacagcgcacgaag

SEQ ID NO: 2272 - RNA, 20 nt, synthetic construct
  misc_feature 1..20: note = Synthetic
  source 1..20: mol_type = other RNA
gcctcagtgctcgtagagtc

SEQ ID NO: 2273 - RNA, 20 nt, synthetic construct
  misc_feature 1..20: note = Synthetic
  source 1..20: mol_type = other RNA
aggttccaccaaatgaccca

SEQ ID NO: 2274 - RNA, 20 nt, synthetic construct
  misc_feature 1..20: note = Synthetic
  source 1..20: mol_type = other RNA
ctgctttccatgctgtagcg

SEQ ID NO: 2275 - RNA, 20 nt, synthetic construct
  misc_feature 1..20: note = Synthetic
  source 1..20: mol_type = other RNA
gacttggttggcaccacttg

SEQ ID NO: 2276 - RNA, 20 nt, synthetic construct
  misc_feature 1..20: note = Synthetic
  source 1..20: mol_type = other RNA
tggcatccaagtacctcgtg

SEQ ID NO: 2277 - RNA, 20 nt, synthetic construct
  misc_feature 1..20: note = Synthetic
  source 1..20: mol_type = other RNA
gggggcaacagttccacacg

SEQ ID NO: 2278 - RNA, 20 nt, synthetic construct
  misc_feature 1..20: note = Synthetic
  source 1..20: mol_type = other RNA
ggaatgtcgccatagagctt

SEQ ID NO: 2279 - RNA, 20 nt, synthetic construct
  misc_feature 1..20: note = Synthetic
  source 1..20: mol_type = other RNA
gaagcggattgccatccaaa

SEQ ID NO: 2280 - RNA, 20 nt, synthetic construct
  misc_feature 1..20: note = Synthetic
  source 1..20: mol_type = other RNA
tttggctttgcgacacgcaa

SEQ ID NO: 2281 - RNA, 20 nt, synthetic construct
  misc_feature 1..20: note = Synthetic
  source 1..20: mol_type = other RNA
tttggtagcaggttttccgc

SEQ ID NO: 2282 - RNA, 20 nt, synthetic construct
  misc_feature 1..20: note = Synthetic
  source 1..20: mol_type = other RNA
ctcttgtccacgctacagca

SEQ ID NO: 2283 - RNA, 20 nt, synthetic construct
  misc_feature 1..20: note = Synthetic
  source 1..20: mol_type = other RNA
gaccatacaggatccccgaa

SEQ ID NO: 2284 - RNA, 20 nt, synthetic construct
  misc_feature 1..20: note = Synthetic
  source 1..20: mol_type = other RNA
cctaggaaaattacctttcg

SEQ ID NO: 2285 - RNA, 20 nt, synthetic construct
  misc_feature 1..20: note = Synthetic
  source 1..20: mol_type = other RNA
agcactggatcgattccgcc

SEQ ID NO: 2286 - RNA, 20 nt, synthetic construct
  misc_feature 1..20: note = Synthetic
  source 1..20: mol_type = other RNA
gtttacggcactggcacatg

SEQ ID NO: 2287 - RNA, 20 nt, synthetic construct
  misc_feature 1..20: note = Synthetic
  source 1..20: mol_type = other RNA
gccgtaaacatgagactgtc

SEQ ID NO: 2288 - RNA, 20 nt, synthetic construct
  misc_feature 1..20: note = Synthetic
  source 1..20: mol_type = other RNA
gcctcggcgaaagtagtggt

SEQ ID NO: 2289 - RNA, 20 nt, synthetic construct
  misc_feature 1..20: note = Synthetic
  source 1..20: mol_type = other RNA
tcttaacgcacagccactgg

SEQ ID NO: 2290 - RNA, 20 nt, synthetic construct
  misc_feature 1..20: note = Synthetic
  source 1..20: mol_type = other RNA
tgaacctgaaatgcatctcg

SEQ ID NO: 2291 - RNA, 20 nt, synthetic construct
  misc_feature 1..20: note = Synthetic
  source 1..20: mol_type = other RNA
tcaggtctgaaggtcatcgt

SEQ ID NO: 2292 - RNA, 20 nt, synthetic construct
  misc_feature 1..20: note = Synthetic
  source 1..20: mol_type = other RNA
gtacgacagcgaccagatca

SEQ ID NO: 2293 - RNA, 20 nt, synthetic construct
  misc_feature 1..20: note = Synthetic
  source 1..20: mol_type = other RNA
ttcttctgcaaacagctgag

SEQ ID NO: 2294 - RNA, 20 nt, synthetic construct
  misc_feature 1..20: note = Synthetic
  source 1..20: mol_type = other RNA
atcttctgcagagaatcgcc

SEQ ID NO: 2295 - RNA, 20 nt, synthetic construct
  misc_feature 1..20: note = Synthetic
  source 1..20: mol_type = other RNA
ttaatgggcaaacgggatgc

SEQ ID NO: 2296 - RNA, 20 nt, synthetic construct
  misc_feature 1..20: note = Synthetic
  source 1..20: mol_type = other RNA
accataaagagcctttaaca

SEQ ID NO: 2297 - RNA, 20 nt, synthetic construct
  misc_feature 1..20: note = Synthetic
  source 1..20: mol_type = other RNA
ctttggattaatgggcaaac

SEQ ID NO: 2298 - RNA, 20 nt, synthetic construct
  misc_feature 1..20: note = Synthetic
  source 1..20: mol_type = other RNA
gccctgttaaaggctcttta

SEQ ID NO: 2299 - RNA, 20 nt, synthetic construct
  misc_feature 1..20: note = Synthetic
  source 1..20: mol_type = other RNA
aaaagactgccaaggccacg

SEQ ID NO: 2300 - RNA, 20 nt, synthetic construct
  misc_feature 1..20: note = Synthetic
  source 1..20: mol_type = other RNA
tctctgcagaagatgctcaa

SEQ ID NO: 2301 - RNA, 20 nt, synthetic construct
  misc_feature 1..20: note = Synthetic
  source 1..20: mol_type = other RNA
atctgaattactggtccgac

SEQ ID NO: 2302 - RNA, 20 nt, synthetic construct
  misc_feature 1..20: note = Synthetic
  source 1..20: mol_type = other RNA
tgttttcagtggcttatgaa

SEQ ID NO: 2303 - RNA, 20 nt, synthetic construct
  misc_feature 1..20: note = Synthetic
  source 1..20: mol_type = other RNA
ggccacgaggattttcatgt

SEQ ID NO: 2304 - RNA, 20 nt, synthetic construct
  misc_feature 1..20: note = Synthetic
  source 1..20: mol_type = other RNA
ctggtcgctgtcgtaccagt

SEQ ID NO: 2305 - RNA, 20 nt, synthetic construct
  misc_feature 1..20: note = Synthetic
  source 1..20: mol_type = other RNA
gaaggggcctcaccttgatc

SEQ ID NO: 2306 - RNA, 20 nt, synthetic construct
  misc_feature 1..20: note = Synthetic
  source 1..20: mol_type = other RNA
gggctccggcagttcctcct

SEQ ID NO: 2307 - RNA, 20 nt, synthetic construct
  misc_feature 1..20: note = Synthetic
  source 1..20: mol_type = other RNA
ccaatgatgatctgaattac

SEQ ID NO: 2308 - RNA, 20 nt, synthetic construct
  misc_feature 1..20: note = Synthetic
  source 1..20: mol_type = other RNA
ggccacttgtttttcaattg

SEQ ID NO: 2309 - RNA, 20 nt, synthetic construct
  misc_feature 1..20: note = Synthetic
  source 1..20: mol_type = other RNA
ttaccctattctgctctcgg

SEQ ID NO: 2310 - RNA, 20 nt, synthetic construct
  misc_feature 1..20: note = Synthetic
  source 1..20: mol_type = other RNA
ctgctctcgggggatacttg

SEQ ID NO: 2311 - RNA, 20 nt, synthetic construct
  misc_feature 1..20: note = Synthetic
  source 1..20: mol_type = other RNA
tatcccccgagagcagaata

SEQ ID NO: 2312 - RNA, 20 nt, synthetic construct
  misc_feature 1..20: note = Synthetic
  source 1..20: mol_type = other RNA
gcaatccctccagagatgag

SEQ ID NO: 2313 - RNA, 20 nt, synthetic construct
  misc_feature 1..20: note = Synthetic
  source 1..20: mol_type = other RNA
gtagagatctggatccctct

SEQ ID NO: 2314 - RNA, 20 nt, synthetic construct
  misc_feature 1..20: note = Synthetic
  source 1..20: mol_type = other RNA
tcacatccgtaggagagtct

SEQ ID NO: 2315 - RNA, 20 nt, synthetic construct
  misc_feature 1..20: note = Synthetic
  source 1..20: mol_type = other RNA
cagcctagctcagagctttg

SEQ ID NO: 2316 - RNA, 20 nt, synthetic construct
  misc_feature 1..20: note = Synthetic
  source 1..20: mol_type = other RNA
gtatcccccgagagcagaat

SEQ ID NO: 2317 - RNA, 20 nt, synthetic construct
  misc_feature 1..20: note = Synthetic
  source 1..20: mol_type = other RNA
ctttaccctagactctccta

SEQ ID NO: 2318 - RNA, 20 nt, synthetic construct
  misc_feature 1..20: note = Synthetic
  source 1..20: mol_type = other RNA
ttctcttgattcacatccgt

SEQ ID NO: 2319 - RNA, 20 nt, synthetic construct
  misc_feature 1..20: note = Synthetic
  source 1..20: mol_type = other RNA
aggggagacttaccttgctg

SEQ ID NO: 2320 - RNA, 20 nt, synthetic construct
  misc_feature 1..20: note = Synthetic
  source 1..20: mol_type = other RNA
cttaccctattctgctctcg

SEQ ID NO: 2321 - RNA, 20 nt, synthetic construct
  misc_feature 1..20: note = Synthetic
  source 1..20: mol_type = other RNA
tgagccaggctagcacaggt

SEQ ID NO: 2322 - RNA, 20 nt, synthetic construct
  misc_feature 1..20: note = Synthetic
  source 1..20: mol_type = other RNA
aaaagccactcatctctgga

SEQ ID NO: 2323 - RNA, 20 nt, synthetic construct
  misc_feature 1..20: note = Synthetic
  source 1..20: mol_type = other RNA
gagctttggggctgtctgta

SEQ ID NO: 2324 - RNA, 20 nt, synthetic construct
  misc_feature 1..20: note = Synthetic
  source 1..20: mol_type = other RNA
ttgctctcccaggcaccatg

SEQ ID NO: 2325 - RNA, 20 nt, synthetic construct
  misc_feature 1..20: note = Synthetic
  source 1..20: mol_type = other RNA
agaggagcgtccagccaggt

SEQ ID NO: 2326 - RNA, 20 nt, synthetic construct
  misc_feature 1..20: note = Synthetic
  source 1..20: mol_type = other RNA
tcagcgccggcgactatgag

SEQ ID NO: 2327 - RNA, 20 nt, synthetic construct
  misc_feature 1..20: note = Synthetic
  source 1..20: mol_type = other RNA
ctgggtctggagataccggg

SEQ ID NO: 2328 - RNA, 20 nt, synthetic construct
  misc_feature 1..20: note = Synthetic
  source 1..20: mol_type = other RNA
aatggataacgtcctcccgg

SEQ ID NO: 2329 - RNA, 20 nt, synthetic construct
  misc_feature 1..20: note = Synthetic
  source 1..20: mol_type = other RNA
ttgctcgtggtagcggtcag

SEQ ID NO: 2330 - RNA, 20 nt, synthetic construct
  misc_feature 1..20: note = Synthetic
  source 1..20: mol_type = other RNA
gtggttgagtagtagccctg

SEQ ID NO: 2331 - RNA, 20 nt, synthetic construct
  misc_feature 1..20: note = Synthetic
  source 1..20: mol_type = other RNA
catcagcgccggcgactatg

SEQ ID NO: 2332 - RNA, 20 nt, synthetic construct
  misc_feature 1..20: note = Synthetic
  source 1..20: mol_type = other RNA
tagtcgccggcgctgatgaa

SEQ ID NO: 2333 - RNA, 20 nt, synthetic construct
  misc_feature 1..20: note = Synthetic
  source 1..20: mol_type = other RNA
tggctatgcatacaccgtag

SEQ ID NO: 2334 - RNA, 20 nt, synthetic construct
  misc_feature 1..20: note = Synthetic
  source 1..20: mol_type = other RNA
cacgaactgattgggttccg

SEQ ID NO: 2335 - RNA, 20 nt, synthetic construct
  misc_feature 1..20: note = Synthetic
  source 1..20: mol_type = other RNA
atcagcgccggcgactatga

SEQ ID NO: 2336 - RNA, 20 nt, synthetic construct
  misc_feature 1..20: note = Synthetic
  source 1..20: mol_type = other RNA
tcgctctccaggttccgtct

SEQ ID NO: 2337 - RNA, 20 nt, synthetic construct
  misc_feature 1..20: note = Synthetic
  source 1..20: mol_type = other RNA
ccgtagtgggaatcacacta

SEQ ID NO: 2338 - RNA, 20 nt, synthetic construct
  misc_feature 1..20: note = Synthetic
  source 1..20: mol_type = other RNA
ccatagtgtgattcccacta

SEQ ID NO: 2339 - RNA, 20 nt, synthetic construct
  misc_feature 1..20: note = Synthetic
  source 1..20: mol_type = other RNA
gagtcgtgtgcatgatcgaa

SEQ ID NO: 2340 - RNA, 20 nt, synthetic construct
  misc_feature 1..20: note = Synthetic
  source 1..20: mol_type = other RNA
tggttgagtagtagccctgg

SEQ ID NO: 2341 - RNA, 20 nt, synthetic construct
  misc_feature 1..20: note = Synthetic
  source 1..20: mol_type = other RNA
ggccgtagtaccattcgttg

SEQ ID NO: 2342 - RNA, 20 nt, synthetic construct
  misc_feature 1..20: note = Synthetic
  source 1..20: mol_type = other RNA
ggtgaacctggccttcgcgg

SEQ ID NO: 2343 - RNA, 20 nt, synthetic construct
  misc_feature 1..20: note = Synthetic
  source 1..20: mol_type = other RNA
ccgtgtaggcagctgcccaa

SEQ ID NO: 2344 - RNA, 20 nt, synthetic construct
  misc_feature 1..20: note = Synthetic
  source 1..20: mol_type = other RNA
agaggtctgagtccaccggg

SEQ ID NO: 2345 - RNA, 20 nt, synthetic construct
  misc_feature 1..20: note = Synthetic
  source 1..20: mol_type = other RNA
cttgaagcccagacggaacc

SEQ ID NO: 2346 - RNA, 20 nt, synthetic construct
  misc_feature 1..20: note = Synthetic
  source 1..20: mol_type = other RNA
gcttggcagagacttgctcg

SEQ ID NO: 2347 - RNA, 20 nt, synthetic construct
  misc_feature 1..20: note = Synthetic
  source 1..20: mol_type = other RNA
atcatgcacacgactctgct

SEQ ID NO: 2348 - RNA, 20 nt, synthetic construct
  misc_feature 1..20: note = Synthetic
  source 1..20: mol_type = other RNA
ggtcaccacaatgaccgtgt

SEQ ID NO: 2349 - RNA, 20 nt, synthetic construct
  misc_feature 1..20: note = Synthetic
  source 1..20: mol_type = other RNA
cgtagtgggaatcacactat

SEQ ID NO: 2350 - RNA, 20 nt, synthetic construct
  misc_feature 1..20: note = Synthetic
  source 1..20: mol_type = other RNA
ctggcgaagacagcggcgat

SEQ ID NO: 2351 - RNA, 20 nt, synthetic construct
  misc_feature 1..20: note = Synthetic
  source 1..20: mol_type = other RNA
ggagtccccggggatctcac

SEQ ID NO: 2352 - RNA, 20 nt, synthetic construct
  misc_feature 1..20: note = Synthetic
  source 1..20: mol_type = other RNA
tatctactccatgacggctg

SEQ ID NO: 2353 - RNA, 20 nt, synthetic construct
  misc_feature 1..20: note = Synthetic
  source 1..20: mol_type = other RNA
cctatgctgtccacaacgaa

SEQ ID NO: 2354 - RNA, 20 nt, synthetic construct
  misc_feature 1..20: note = Synthetic
  source 1..20: mol_type = other RNA
agccatggaggcctccgcga

SEQ ID NO: 2355 - RNA, 20 nt, synthetic construct
  misc_feature 1..20: note = Synthetic
  source 1..20: mol_type = other RNA
ttccagcccctcatagtcgc

SEQ ID NO: 2356 - RNA, 20 nt, synthetic construct
  misc_feature 1..20: note = Synthetic
  source 1..20: mol_type = other RNA
tctactgctgcctcaatgac

SEQ ID NO: 2357 - RNA, 20 nt, synthetic construct
  misc_feature 1..20: note = Synthetic
  source 1..20: mol_type = other RNA
ggctatgcatacaccgtagt

SEQ ID NO: 2358 - RNA, 20 nt, synthetic construct
  misc_feature 1..20: note = Synthetic
  source 1..20: mol_type = other RNA
ggctggttgcacgaactgat

SEQ ID NO: 2359 - RNA, 20 nt, synthetic construct
  misc_feature 1..20: note = Synthetic
  source 1..20: mol_type = other RNA
gctggttgcacgaactgatt

SEQ ID NO: 2360 - RNA, 20 nt, synthetic construct
  misc_feature 1..20: note = Synthetic
  source 1..20: mol_type = other RNA
agtcgccggcgctgatgaag

SEQ ID NO: 2361 - RNA, 20 nt, synthetic construct
  misc_feature 1..20: note = Synthetic
  source 1..20: mol_type = other RNA
tgtgtacaaagtcagccgcc

SEQ ID NO: 2362 - RNA, 20 nt, synthetic construct
  misc_feature 1..20: note = Synthetic
  source 1..20: mol_type = other RNA
cgccggcgactatgaggggc

SEQ ID NO: 2363 - RNA, 20 nt, synthetic construct
  misc_feature 1..20: note = Synthetic
  source 1..20: mol_type = other RNA
tgctgccccttcatcagcgc

SEQ ID NO: 2364 - RNA, 20 nt, synthetic construct
  misc_feature 1..20: note = Synthetic
  source 1..20: mol_type = other RNA
ctcgctctccaggttccgtc

SEQ ID NO: 2365 - RNA, 20 nt, synthetic construct
  misc_feature 1..20: note = Synthetic
  source 1..20: mol_type = other RNA
gggatcctcacctgtcattg

SEQ ID NO: 2366 - RNA, 20 nt, synthetic construct
  misc_feature 1..20: note = Synthetic
  source 1..20: mol_type = other RNA
ggtcaaaatgatgattgtcg

SEQ ID NO: 2367 - RNA, 20 nt, synthetic construct
  misc_feature 1..20: note = Synthetic
  source 1..20: mol_type = other RNA
atgtatgatggccatgtacc

SEQ ID NO: 2368 - RNA, 20 nt, synthetic construct
  misc_feature 1..20: note = Synthetic
  source 1..20: mol_type = other RNA
atcaaaggccacagccgtca

SEQ ID NO: 2369 - RNA, 20 nt, synthetic construct
  misc_feature 1..20: note = Synthetic
  source 1..20: mol_type = other RNA
agctgcctacacggtcattg

SEQ ID NO: 2370 - RNA, 20 nt, synthetic construct
  misc_feature 1..20: note = Synthetic
  source 1..20: mol_type = other RNA
tgggcttcaagcatgccttc

SEQ ID NO: 2371 - RNA, 20 nt, synthetic construct
  misc_feature 1..20: note = Synthetic
  source 1..20: mol_type = other RNA
ctgtggttgagtagtagccc

SEQ ID NO: 2372 - RNA, 20 nt, synthetic construct
  misc_feature 1..20: note = Synthetic
  source 1..20: mol_type = other RNA
agccgtcatggagtagatac

SEQ ID NO: 2373 - RNA, 20 nt, synthetic construct
  misc_feature 1..20: note = Synthetic
  source 1..20: mol_type = other RNA
gtccacaacgaatggtacta

SEQ ID NO: 2374 - RNA, 20 nt, synthetic construct
  misc_feature 1..20: note = Synthetic
  source 1..20: mol_type = other RNA
catctacttcctgccgctcg

SEQ ID NO: 2375 - RNA, 20 nt, synthetic construct
  misc_feature 1..20: note = Synthetic
  source 1..20: mol_type = other RNA
gctacaaacatcaccgcgag

SEQ ID NO: 2376 - RNA, 20 nt, synthetic construct
  misc_feature 1..20: note = Synthetic
  source 1..20: mol_type = other RNA
agatgagggcgatcaccacg

SEQ ID NO: 2377 - RNA, 20 nt, synthetic construct
  misc_feature 1..20: note = Synthetic
  source 1..20: mol_type = other RNA
gtgacacctgttgactctcg

SEQ ID NO: 2378 - RNA, 20 nt, synthetic construct
  misc_feature 1..20: note = Synthetic
  source 1..20: mol_type = other RNA
gtgcccggacatcaggcgca

SEQ ID NO: 2379 - RNA, 20 nt, synthetic construct
  misc_feature 1..20: note = Synthetic
  source 1..20: mol_type = other RNA
gggtgccaccaagtgcgtgg

SEQ ID NO: 2380 - RNA, 20 nt, synthetic construct
  misc_feature 1..20: note = Synthetic
  source 1..20: mol_type = other RNA
ccaggccaccacgcacttgg

SEQ ID NO: 2381 - RNA, 20 nt, synthetic construct
  misc_feature 1..20: note = Synthetic
  source 1..20: mol_type = other RNA
ggatcatcctggcccatcgg

SEQ ID NO: 2382 - RNA, 20 nt, synthetic construct
  misc_feature 1..20: note = Synthetic
  source 1..20: mol_type = other RNA
gacgatggcattacccgtca

SEQ ID NO: 2383 - RNA, 20 nt, synthetic construct
  misc_feature 1..20: note = Synthetic
  source 1..20: mol_type = other RNA
ggcgtccccaggatggatca

SEQ ID NO: 2384 - RNA, 20 nt, synthetic construct
  misc_feature 1..20: note = Synthetic
  source 1..20: mol_type = other RNA
cccctccgaggctaccagtg

SEQ ID NO: 2385 - RNA, 20 nt, synthetic construct
  misc_feature 1..20: note = Synthetic
  source 1..20: mol_type = other RNA
tgagggcgatcaccacgagg

SEQ ID NO: 2386 - RNA, 20 nt, synthetic construct
  misc_feature 1..20: note = Synthetic
  source 1..20: mol_type = other RNA
gcctggcccgaagacagcgg

SEQ ID NO: 2387 - RNA, 20 nt, synthetic construct
  misc_feature 1..20: note = Synthetic
  source 1..20: mol_type = other RNA
gactgtgcgcatcctccgat

SEQ ID NO: 2388 - RNA, 20 nt, synthetic construct
  misc_feature 1..20: note = Synthetic
  source 1..20: mol_type = other RNA
agtcaacaggtgtcacacta

SEQ ID NO: 2389 - RNA, 20 nt, synthetic construct
  misc_feature 1..20: note = Synthetic
  source 1..20: mol_type = other RNA
gcaataaccgccttggtgct

SEQ ID NO: 2390 - RNA, 20 nt, synthetic construct
  misc_feature 1..20: note = Synthetic
  source 1..20: mol_type = other RNA
accatagccctgatccatcc

SEQ ID NO: 2391 - RNA, 20 nt, synthetic construct
  misc_feature 1..20: note = Synthetic
  source 1..20: mol_type = other RNA
ccggaatccagagcgaaacc

SEQ ID NO: 2392 - RNA, 20 nt, synthetic construct
  misc_feature 1..20: note = Synthetic
  source 1..20: mol_type = other RNA
cggaatccagagcgaaacct

SEQ ID NO: 2393 - RNA, 20 nt, synthetic construct
  misc_feature 1..20: note = Synthetic
  source 1..20: mol_type = other RNA
gcaccgtgcgcctgatgtcc

SEQ ID NO: 2394 - RNA, 20 nt, synthetic construct
  misc_feature 1..20: note = Synthetic
  source 1..20: mol_type = other RNA
tcatcggcctcacgctctgg

SEQ ID NO: 2395 - RNA, 20 nt, synthetic construct
  misc_feature 1..20: note = Synthetic
  source 1..20: mol_type = other RNA
cgtgaggccgatgacgctgt

SEQ ID NO: 2396 - RNA, 20 nt, synthetic construct
  misc_feature 1..20: note = Synthetic
  source 1..20: mol_type = other RNA
tccaccgtcaccatggacca

SEQ ID NO: 2397 - RNA, 20 nt, synthetic construct
  misc_feature 1..20: note = Synthetic
  source 1..20: mol_type = other RNA
tgaccgccattgctgccgac

SEQ ID NO: 2398 - RNA, 20 nt, synthetic construct
  misc_feature 1..20: note = Synthetic
  source 1..20: mol_type = other RNA
atgcccgtggtgttgctctc

SEQ ID NO: 2399 - RNA, 20 nt, synthetic construct
  misc_feature 1..20: note = Synthetic
  source 1..20: mol_type = other RNA
tcgagcttatcttccttggt

SEQ ID NO: 2400 - RNA, 20 nt, synthetic construct
  misc_feature 1..20: note = Synthetic
  source 1..20: mol_type = other RNA
ggcaccgtgcgcctgatgtc

SEQ ID NO: 2401 - RNA, 20 nt, synthetic construct
  misc_feature 1..20: note = Synthetic
  source 1..20: mol_type = other RNA
ctgcgcgcctccagagcgtg

SEQ ID NO: 2402 - RNA, 20 nt, synthetic construct
  misc_feature 1..20: note = Synthetic
  source 1..20: mol_type = other RNA
ttgcctgtcggcagcaatgg

SEQ ID NO: 2403 - RNA, 20 nt, synthetic construct
  misc_feature 1..20: note = Synthetic
  source 1..20: mol_type = other RNA
tgactgtgcgcatcctccga

SEQ ID NO: 2404 - RNA, 20 nt, synthetic construct
  misc_feature 1..20: note = Synthetic
  source 1..20: mol_type = other RNA
gccccctccgaggctaccag

SEQ ID NO: 2405 - RNA, 20 nt, synthetic construct
  misc_feature 1..20: note = Synthetic
  source 1..20: mol_type = other RNA
cgctcccccaggtttcgctc

SEQ ID NO: 2406 - RNA, 20 nt, synthetic construct
  misc_feature 1..20: note = Synthetic
  source 1..20: mol_type = other RNA
gatgccagcaataaccgcct

SEQ ID NO: 2407 - RNA, 20 nt, synthetic construct
  misc_feature 1..20: note = Synthetic
  source 1..20: mol_type = other RNA
gggcgtccccaggatggatc

SEQ ID NO: 2408 - RNA, 20 nt, synthetic construct
  misc_feature 1..20: note = Synthetic
  source 1..20: mol_type = other RNA
ccccactggtagcctcggag

SEQ ID NO: 2409 - RNA, 20 nt, synthetic construct
  misc_feature 1..20: note = Synthetic
  source 1..20: mol_type = other RNA
acctgttgactctcgtggag

SEQ ID NO: 2410 - RNA, 20 nt, synthetic construct
  misc_feature 1..20: note = Synthetic
  source 1..20: mol_type = other RNA
ccacgcacttggtggcaccc

SEQ ID NO: 2411 - RNA, 20 nt, synthetic construct
  misc_feature 1..20: note = Synthetic
  source 1..20: mol_type = other RNA
accctggtccatggtgacgg

SEQ ID NO: 2412 - RNA, 20 nt, synthetic construct
  misc_feature 1..20: note = Synthetic
  source 1..20: mol_type = other RNA
caactacttcatcgtcaatc

SEQ ID NO: 2413 - RNA, 20 nt, synthetic construct
  misc_feature 1..20: note = Synthetic
  source 1..20: mol_type = other RNA
tgcgcatcctccgatgggcc

SEQ ID NO: 2414 - RNA, 20 nt, synthetic construct
  misc_feature 1..20: note = Synthetic
  source 1..20: mol_type = other RNA
ccccctccgaggctaccagt

SEQ ID NO: 2415 - RNA, 20 nt, synthetic construct
  misc_feature 1..20: note = Synthetic
  source 1..20: mol_type = other RNA
cagctcgagcttatcttcct

SEQ ID NO: 2416 - RNA, 20 nt, synthetic construct
  misc_feature 1..20: note = Synthetic
  source 1..20: mol_type = other RNA
gcgcgcagtgcccggacatc

SEQ ID NO: 2417 - RNA, 20 nt, synthetic construct
  misc_feature 1..20: note = Synthetic
  source 1..20: mol_type = other RNA
tttgtagcctacagcgtcat

SEQ ID NO: 2418 - RNA, 20 nt, synthetic construct
  misc_feature 1..20: note = Synthetic
  source 1..20: mol_type = other RNA
tcccccagaggccttacagg

SEQ ID NO: 2419 - RNA, 20 nt, synthetic construct
  misc_feature 1..20: note = Synthetic
  source 1..20: mol_type = other RNA
gcccccgctgtcttcgggcc

SEQ ID NO: 2420 - RNA, 20 nt, synthetic construct
  misc_feature 1..20: note = Synthetic
  source 1..20: mol_type = other RNA
tccccactggtagcctcgga

SEQ ID NO: 2421 - RNA, 20 nt, synthetic construct
  misc_feature 1..20: note = Synthetic
  source 1..20: mol_type = other RNA
ctccaccgtcaccatggacc

SEQ ID NO: 2422 - RNA, 20 nt, synthetic construct
  misc_feature 1..20: note = Synthetic
  source 1..20: mol_type = other RNA
tctacgcgcttcatagcgag

SEQ ID NO: 2423 - RNA, 20 nt, synthetic construct
  misc_feature 1..20: note = Synthetic
  source 1..20: mol_type = other RNA
cagagcgcgatgcgccagga

SEQ ID NO: 2424 - RNA, 20 nt, synthetic construct
  misc_feature 1..20: note = Synthetic
  source 1..20: mol_type = other RNA
ggggtcaaacacgactgtca

SEQ ID NO: 2425 - RNA, 20 nt, synthetic construct
  misc_feature 1..20: note = Synthetic
  source 1..20: mol_type = other RNA
gcagaaacctggatagacgg

SEQ ID NO: 2426 - RNA, 20 nt, synthetic construct
  misc_feature 1..20: note = Synthetic
  source 1..20: mol_type = other RNA
tatgtacaccgtgaccagaa

SEQ ID NO: 2427 - RNA, 20 nt, synthetic construct
  misc_feature 1..20: note = Synthetic
  source 1..20: mol_type = other RNA
ttgccggtttggatgaaacc

SEQ ID NO: 2428 - RNA, 20 nt, synthetic construct
  misc_feature 1..20: note = Synthetic
  source 1..20: mol_type = other RNA
ctactccatgacggccattg

SEQ ID NO: 2429 - RNA, 20 nt, synthetic construct
  misc_feature 1..20: note = Synthetic
  source 1..20: mol_type = other RNA
ccggtttggatgaaacctgg

SEQ ID NO: 2430 - RNA, 20 nt, synthetic construct
  misc_feature 1..20: note = Synthetic
  source 1..20: mol_type = other RNA
ggacggctgcacgaactggt

SEQ ID NO: 2431 - RNA, 20 nt, synthetic construct
  misc_feature 1..20: note = Synthetic
  source 1..20: mol_type = other RNA
cgccccggcagctagcgagg

SEQ ID NO: 2432 - RNA, 20 nt, synthetic construct
  misc_feature 1..20: note = Synthetic
  source 1..20: mol_type = other RNA
ctgctcatgatacttgtcac

SEQ ID NO: 2433 - RNA, 20 nt, synthetic construct
  misc_feature 1..20: note = Synthetic
  source 1..20: mol_type = other RNA
attgaccaacgtgttgaagg

SEQ ID NO: 2434 - RNA, 20 nt, synthetic construct
  misc_feature 1..20: note = Synthetic
  source 1..20: mol_type = other RNA
gcgctctggtccctggcgta

SEQ ID NO: 2435 - RNA, 20 nt, synthetic construct
  misc_feature 1..20: note = Synthetic
  source 1..20: mol_type = other RNA
acaggcagtcccagcgcgga

SEQ ID NO: 2436 - RNA, 20 nt, synthetic construct
  misc_feature 1..20: note = Synthetic
  source 1..20: mol_type = other RNA
caggcagtcccagcgcggaa

SEQ ID NO: 2437 - RNA, 20 nt, synthetic construct
  misc_feature 1..20: note = Synthetic
  source 1..20: mol_type = other RNA
acaaagcagagagtacggcc

SEQ ID NO: 2438 - RNA, 20 nt, synthetic construct
  misc_feature 1..20: note = Synthetic
  source 1..20: mol_type = other RNA
agtacggcctggcatgactt

SEQ ID NO: 2439 - RNA, 20 nt, synthetic construct
  misc_feature 1..20: note = Synthetic
  source 1..20: mol_type = other RNA
ctggcgaacacagctgtgat

SEQ ID NO: 2440 - RNA, 20 nt, synthetic construct
  misc_feature 1..20: note = Synthetic
  source 1..20: mol_type = other RNA
ttccgcgctgggactgcctg

SEQ ID NO: 2441 - RNA, 20 nt, synthetic construct
  misc_feature 1..20: note = Synthetic
  source 1..20: mol_type = other RNA
tggtggtgtctgcatcgttg

SEQ ID NO: 2442 - RNA, 20 nt, synthetic construct
  misc_feature 1..20: note = Synthetic
  source 1..20: mol_type = other RNA
gagctctagctcatcatagc

SEQ ID NO: 2443 - RNA, 20 nt, synthetic construct
  misc_feature 1..20: note = Synthetic
  source 1..20: mol_type = other RNA
tgacggccattgcggtggac

SEQ ID NO: 2444 - RNA, 20 nt, synthetic construct
  misc_feature 1..20: note = Synthetic
  source 1..20: mol_type = other RNA
ctccatgacggccattgcgg

SEQ ID NO: 2445 - RNA, 20 nt, synthetic construct
  misc_feature 1..20: note = Synthetic
  source 1..20: mol_type = other RNA
tcctcacctgtccaccgcaa

SEQ ID NO: 2446 - RNA, 20 nt, synthetic construct
  misc_feature 1..20: note = Synthetic
  source 1..20: mol_type = other RNA
gcgcatcgcgctctggtccc

SEQ ID NO: 2447 - RNA, 20 nt, synthetic construct
  misc_feature 1..20: note = Synthetic
  source 1..20: mol_type = other RNA
caccaccacaccatacgcca

SEQ ID NO: 2448 - RNA, 20 nt, synthetic construct
  misc_feature 1..20: note = Synthetic
  source 1..20: mol_type = other RNA
accagttcgtgcagccgtcc

SEQ ID NO: 2449 - RNA, 20 nt, synthetic construct
  misc_feature 1..20: note = Synthetic
  source 1..20: mol_type = other RNA
ggaccagagcgcgatgcgcc

SEQ ID NO: 2450 - RNA, 20 nt, synthetic construct
  misc_feature 1..20: note = Synthetic
  source 1..20: mol_type = other RNA
gccaggacggctgcacgaac

SEQ ID NO: 2451 - RNA, 20 nt, synthetic construct
  misc_feature 1..20: note = Synthetic
  source 1..20: mol_type = other RNA
ctgcaactgctggaccaagc

SEQ ID NO: 2452 - RNA, 20 nt, synthetic construct
  misc_feature 1..20: note = Synthetic
  source 1..20: mol_type = other RNA
ccacgggggcagttgagact

SEQ ID NO: 2453 - RNA, 20 nt, synthetic construct
  misc_feature 1..20: note = Synthetic
  source 1..20: mol_type = other RNA
gaaacctggatagacggggg

SEQ ID NO: 2454 - RNA, 20 nt, synthetic construct
  misc_feature 1..20: note = Synthetic
  source 1..20: mol_type = other RNA
caagtatcatgagcagctaa

SEQ ID NO: 2455 - RNA, 20 nt, synthetic construct
  misc_feature 1..20: note = Synthetic
  source 1..20: mol_type = other RNA
gacagtcctcatgcgcttgt

SEQ ID NO: 2456 - RNA, 20 nt, synthetic construct
  misc_feature 1..20: note = Synthetic
  source 1..20: mol_type = other RNA
aggcagtcccagcgcggaag

SEQ ID NO: 2457 - RNA, 20 nt, synthetic construct
  misc_feature 1..20: note = Synthetic
  source 1..20: mol_type = other RNA
ggccgccccggcagctagcg

SEQ ID NO: 2458 - RNA, 20 nt, synthetic construct
  misc_feature 1..20: note = Synthetic
  source 1..20: mol_type = other RNA
ccaacgatgcagacaccacc

SEQ ID NO: 2459 - RNA, 20 nt, synthetic construct
  misc_feature 1..20: note = Synthetic
  source 1..20: mol_type = other RNA
ctggtggtgtctgcatcgtt

SEQ ID NO: 2460 - RNA, 20 nt, synthetic construct
  misc_feature 1..20: note = Synthetic
  source 1..20: mol_type = other RNA
tacatactgctttgccggtt

SEQ ID NO: 2461 - RNA, 20 nt, synthetic construct
  misc_feature 1..20: note = Synthetic
  source 1..20: mol_type = other RNA
gtccaccgcaatggccgtca

SEQ ID NO: 2462 - RNA, 20 nt, synthetic construct
  misc_feature 1..20: note = Synthetic
  source 1..20: mol_type = other RNA
tcctggcccacaagcgcatg

SEQ ID NO: 2463 - RNA, 20 nt, synthetic construct
  misc_feature 1..20: note = Synthetic
  source 1..20: mol_type = other RNA
tgacagtcctcatgcgcttg

SEQ ID NO: 2464 - RNA, 20 nt, synthetic construct
  misc_feature 1..20: note = Synthetic
  source 1..20: mol_type = other RNA
cggtgtacatactgctttgc

SEQ ID NO: 2465 - RNA, 20 nt, synthetic construct
  misc_feature 1..20: note = Synthetic
  source 1..20: mol_type = other RNA
tacttgtcacaggtatctcc

SEQ ID NO: 2466 - RNA, 20 nt, synthetic construct
  misc_feature 1..20: note = Synthetic
  source 1..20: mol_type = other RNA
catggccgccttcaacacgt

SEQ ID NO: 2467 - RNA, 20 nt, synthetic construct
  misc_feature 1..20: note = Synthetic
  source 1..20: mol_type = other RNA
gctgcacgaactggttggtg

SEQ ID NO: 2468 - RNA, 20 nt, synthetic construct
  misc_feature 1..20: note = Synthetic
  source 1..20: mol_type = other RNA
gaccgcctcgctagctgccg

SEQ ID NO: 2469 - RNA, 20 nt, synthetic construct
  misc_feature 1..20: note = Synthetic
  source 1..20: mol_type = other RNA
tgaccgcctcgctagctgcc

SEQ ID NO: 2470 - RNA, 20 nt, synthetic construct
  misc_feature 1..20: note = Synthetic
  source 1..20: mol_type = other RNA
gtagacgaaccggatgtcag

SEQ ID NO: 2471 - RNA, 20 nt, synthetic construct
  misc_feature 1..20: note = Synthetic
  source 1..20: mol_type = other RNA
gaattgcagaaggccgtctg

SEQ ID NO: 2472 - RNA, 20 nt, synthetic construct
  misc_feature 1..20: note = Synthetic
  source 1..20: mol_type = other RNA
gcgcggcctagcaaccacga

SEQ ID NO: 2473 - RNA, 20 nt, synthetic construct
  misc_feature 1..20: note = Synthetic
  source 1..20: mol_type = other RNA
caggtcccacaaccgcagcg

SEQ ID NO: 2474 - RNA, 20 nt, synthetic construct
  misc_feature 1..20: note = Synthetic
  source 1..20: mol_type = other RNA
ggcgcggcctagcaaccacg

SEQ ID NO: 2475 - RNA, 20 nt, synthetic construct
  misc_feature 1..20: note = Synthetic
  source 1..20: mol_type = other RNA
tcatcagggccaagttcgtg

SEQ ID NO: 2476 - RNA, 20 nt, synthetic construct
  misc_feature 1..20: note = Synthetic
  source 1..20: mol_type = other RNA
ggttgctaggccgcgcccca

SEQ ID NO: 2477 - RNA, 20 nt, synthetic construct
  misc_feature 1..20: note = Synthetic
  source 1..20: mol_type = other RNA
ctcataacgctggtataagg

SEQ ID NO: 2478 - RNA, 20 nt, synthetic construct
  misc_feature 1..20: note = Synthetic
  source 1..20: mol_type = other RNA
caatgagaaactcctcgctg

SEQ ID NO: 2479 - RNA, 20 nt, synthetic construct
  misc_feature 1..20: note = Synthetic
  source 1..20: mol_type = other RNA
aattgcagaaggccgtctgt

SEQ ID NO: 2480 - RNA, 20 nt, synthetic construct
  misc_feature 1..20: note = Synthetic
  source 1..20: mol_type = other RNA
tccgcagacactctccatgg

SEQ ID NO: 2481 - RNA, 20 nt, synthetic construct
  misc_feature 1..20: note = Synthetic
  source 1..20: mol_type = other RNA
atcagagcctcgccccctcg

SEQ ID NO: 2482 - RNA, 20 nt, synthetic construct
  misc_feature 1..20: note = Synthetic
  source 1..20: mol_type = other RNA
gatctcataacgctggtata

SEQ ID NO: 2483 - RNA, 20 nt, synthetic construct
  misc_feature 1..20: note = Synthetic
  source 1..20: mol_type = other RNA
cgcggcctagcaaccacgag

SEQ ID NO: 2484 - RNA, 20 nt, synthetic construct
  misc_feature 1..20: note = Synthetic
  source 1..20: mol_type = other RNA
gcggcctagcaaccacgagg

SEQ ID NO: 2485 - RNA, 20 nt, synthetic construct
  misc_feature 1..20: note = Synthetic
  source 1..20: mol_type = other RNA
accgaggtcggaattgcaga

SEQ ID NO: 2486 - RNA, 20 nt, synthetic construct
  misc_feature 1..20: note = Synthetic
  source 1..20: mol_type = other RNA
gtatccgcagacactctcca

SEQ ID NO: 2487 - RNA, 20 nt, synthetic construct
  misc_feature 1..20: note = Synthetic
  source 1..20: mol_type = other RNA
agtcatcagggccaagttcg

SEQ ID NO: 2488 - RNA, 20 nt, synthetic construct
  misc_feature 1..20: note = Synthetic
  source 1..20: mol_type = other RNA
tcatcttgatctcataacgc

SEQ ID NO: 2489 - RNA, 20 nt, synthetic construct
  misc_feature 1..20: note = Synthetic
  source 1..20: mol_type = other RNA
tggcgggggtgtagacgaac

SEQ ID NO: 2490 - RNA, 20 nt, synthetic construct
  misc_feature 1..20: note = Synthetic
  source 1..20: mol_type = other RNA
gggtgaggactcaccgaggt

SEQ ID NO: 2491 - RNA, 20 nt, synthetic construct
  misc_feature 1..20: note = Synthetic
  source 1..20: mol_type = other RNA
taggggatgccgctgacatc

SEQ ID NO: 2492 - RNA, 20 nt, synthetic construct
  misc_feature 1..20: note = Synthetic
  source 1..20: mol_type = other RNA
cgcagacactctccatggcg

SEQ ID NO: 2493 - RNA, 20 nt, synthetic construct
  misc_feature 1..20: note = Synthetic
  source 1..20: mol_type = other RNA
ttcaccaagacctacactgt

SEQ ID NO: 2494 - RNA, 20 nt, synthetic construct
  misc_feature 1..20: note = Synthetic
  source 1..20: mol_type = other RNA
tcaggctatctgggaccgca

SEQ ID NO: 2495 - RNA, 20 nt, synthetic construct
  misc_feature 1..20: note = Synthetic
  source 1..20: mol_type = other RNA
ttctggtgtccccacgaact

SEQ ID NO: 2496 - RNA, 20 nt, synthetic construct
  misc_feature 1..20: note = Synthetic
  source 1..20: mol_type = other RNA
gtcatcagggccaagttcgt

SEQ ID NO: 2497 - RNA, 20 nt, synthetic construct
  misc_feature 1..20: note = Synthetic
  source 1..20: mol_type = other RNA
tggttgctaggccgcgcccc

SEQ ID NO: 2498 - RNA, 20 nt, synthetic construct
  misc_feature 1..20: note = Synthetic
  source 1..20: mol_type = other RNA
gttcgtctacacccccgcca

SEQ ID NO: 2499 - RNA, 20 nt, synthetic construct
  misc_feature 1..20: note = Synthetic
  source 1..20: mol_type = other RNA
gtgtctgcggatacttccac

SEQ ID NO: 2500 - RNA, 20 nt, synthetic construct
  misc_feature 1..20: note = Synthetic
  source 1..20: mol_type = other RNA
ctcgccccctcgtggttgct

SEQ ID NO: 2501 - RNA, 20 nt, synthetic construct
  misc_feature 1..20: note = Synthetic
  source 1..20: mol_type = other RNA
taaagggttccaagccttag

SEQ ID NO: 2502 - RNA, 20 nt, synthetic construct
  misc_feature 1..20: note = Synthetic
  source 1..20: mol_type = other RNA
gcagacactctccatggcgg

SEQ ID NO: 2503 - RNA, 20 nt, synthetic construct
  misc_feature 1..20: note = Synthetic
  source 1..20: mol_type = other RNA
gaaactcctcgctgcggttg

SEQ ID NO: 2504 - RNA, 20 nt, synthetic construct
  misc_feature 1..20: note = Synthetic
  source 1..20: mol_type = other RNA
ctagcaaccacgagggggcg

SEQ ID NO: 2505 - RNA, 20 nt, synthetic construct
  misc_feature 1..20: note = Synthetic
  source 1..20: mol_type = other RNA
ctgagcttagctcagcgccg

SEQ ID NO: 2506 - RNA, 20 nt, synthetic construct
  misc_feature 1..20: note = Synthetic
  source 1..20: mol_type = other RNA
aacgctggtataaggtggtc

SEQ ID NO: 2507 - RNA, 20 nt, synthetic construct
  misc_feature 1..20: note = Synthetic
  source 1..20: mol_type = other RNA
ataaagggttccaagcctta

SEQ ID NO: 2508 - RNA, 20 nt, synthetic construct
  misc_feature 1..20: note = Synthetic
  source 1..20: mol_type = other RNA
aaactcctcgctgcggttgt

SEQ ID NO: 2509 - RNA, 20 nt, synthetic construct
  misc_feature 1..20: note = Synthetic
  source 1..20: mol_type = other RNA
cgggcaggattcaggctatc

SEQ ID NO: 2510 - RNA, 20 nt, synthetic construct
  misc_feature 1..20: note = Synthetic
  source 1..20: mol_type = other RNA
atgatggcaagatgtacacg

SEQ ID NO: 2511 - RNA, 20 nt, synthetic construct
  misc_feature 1..20: note = Synthetic
  source 1..20: mol_type = other RNA
cacgatgagcccgagccaag

SEQ ID NO: 2512 - RNA, 20 nt, synthetic construct
  misc_feature 1..20: note = Synthetic
  source 1..20: mol_type = other RNA
gtgtagaccagcgtgccgaa

SEQ ID NO: 2513 - RNA, 20 nt, synthetic construct
  misc_feature 1..20: note = Synthetic
  source 1..20: mol_type = other RNA
ggtgtagaccagcgtgccga

SEQ ID NO: 2514 - RNA, 20 nt, synthetic construct
  misc_feature 1..20: note = Synthetic
  source 1..20: mol_type = other RNA
gactctcggaagcttccgta

SEQ ID NO: 2515 - RNA, 20 nt, synthetic construct
  misc_feature 1..20: note = Synthetic
  source 1..20: mol_type = other RNA
ttgatgatgcttttatccgg

SEQ ID NO: 2516 - RNA, 20 nt, synthetic construct
  misc_feature 1..20: note = Synthetic
  source 1..20: mol_type = other RNA
gcacgatgagcccgagccaa

SEQ ID NO: 2517 - RNA, 20 nt, synthetic construct
  misc_feature 1..20: note = Synthetic
  source 1..20: mol_type = other RNA
cgtatggatgtactgcacat

SEQ ID NO: 2518 - RNA, 20 nt, synthetic construct
  misc_feature 1..20: note = Synthetic
  source 1..20: mol_type = other RNA
tacgcctgcatccggcagaa

SEQ ID NO: 2519 - RNA, 20 nt, synthetic construct
  misc_feature 1..20: note = Synthetic
  source 1..20: mol_type = other RNA
cagcagcggcaatgacccct

SEQ ID NO: 2520 - RNA, 20 nt, synthetic construct
  misc_feature 1..20: note = Synthetic
  source 1..20: mol_type = other RNA
cctgtaggtcgcgtctatga

SEQ ID NO: 2521 - RNA, 20 nt, synthetic construct
  misc_feature 1..20: note = Synthetic
  source 1..20: mol_type = other RNA
ccggatgcaggcgtagtgtt

SEQ ID NO: 2522 - RNA, 20 nt, synthetic construct
  misc_feature 1..20: note = Synthetic
  source 1..20: mol_type = other RNA
gatgatgcttttatccgggg

SEQ ID NO: 2523 - RNA, 20 nt, synthetic construct
  misc_feature 1..20: note = Synthetic
  source 1..20: mol_type = other RNA
tgatgatgcttttatccggg

SEQ ID NO: 2524 - RNA, 20 nt, synthetic construct
  misc_feature 1..20: note = Synthetic
  source 1..20: mol_type = other RNA
attgatgatgcttttatccg

SEQ ID NO: 2525 - RNA, 20 nt, synthetic construct
  misc_feature 1..20: note = Synthetic
  source 1..20: mol_type = other RNA
ccaggagcgcttaccgatgt

SEQ ID NO: 2526 - RNA, 20 nt, synthetic construct
  misc_feature 1..20: note = Synthetic
  source 1..20: mol_type = other RNA
ttttgcccacagatgtaccg

SEQ ID NO: 2527 - RNA, 20 nt, synthetic construct
  misc_feature 1..20: note = Synthetic
  source 1..20: mol_type = other RNA
cacggggctgtgcaacttcg

SEQ ID NO: 2528 - RNA, 20 nt, synthetic construct
  misc_feature 1..20: note = Synthetic
  source 1..20: mol_type = other RNA
tgcaggcgtagtgtttggac

SEQ ID NO: 2529 - RNA, 20 nt, synthetic construct
  misc_feature 1..20: note = Synthetic
  source 1..20: mol_type = other RNA
ctacgcctgcatccggcaga

SEQ ID NO: 2530 - RNA, 20 nt, synthetic construct
  misc_feature 1..20: note = Synthetic
  source 1..20: mol_type = other RNA
cggcaatgaccccttggctc

SEQ ID NO: 2531 - RNA, 20 nt, synthetic construct
  misc_feature 1..20: note = Synthetic
  source 1..20: mol_type = other RNA
gggcgagcatgtgcacgcct

SEQ ID NO: 2532 - RNA, 20 nt, synthetic construct
  misc_feature 1..20: note = Synthetic
  source 1..20: mol_type = other RNA
ccgtatggatgtactgcaca

SEQ ID NO: 2533 - RNA, 20 nt, synthetic construct
  misc_feature 1..20: note = Synthetic
  source 1..20: mol_type = other RNA
atagttcagccccttgcgct

SEQ ID NO: 2534 - RNA, 20 nt, synthetic construct
  misc_feature 1..20: note = Synthetic
  source 1..20: mol_type = other RNA
ttaccttgcagttacaaccc

SEQ ID NO: 2535 - RNA, 20 nt, synthetic construct
  misc_feature 1..20: note = Synthetic
  source 1..20: mol_type = other RNA
gtaccgaggatgggcccccc

SEQ ID NO: 2536 - RNA, 20 nt, synthetic construct
  misc_feature 1..20: note = Synthetic
  source 1..20: mol_type = other RNA
agcacgatgagcccgagcca

SEQ ID NO: 2537 - RNA, 20 nt, synthetic construct
  misc_feature 1..20: note = Synthetic
  source 1..20: mol_type = other RNA
gcggcaatgaccccttggct

SEQ ID NO: 2538 - RNA, 20 nt, synthetic construct
  misc_feature 1..20: note = Synthetic
  source 1..20: mol_type = other RNA
gccttctgcaactccgacat

SEQ ID NO: 2539 - RNA, 20 nt, synthetic construct
  misc_feature 1..20: note = Synthetic
  source 1..20: mol_type = other RNA
gtatggatgtactgcacatg

SEQ ID NO: 2540 - RNA, 20 nt, synthetic construct
  misc_feature 1..20: note = Synthetic
  source 1..20: mol_type = other RNA
ggtccagagacactcgttct

SEQ ID NO: 2541 - RNA, 20 nt, synthetic construct
  misc_feature 1..20: note = Synthetic
  source 1..20: mol_type = other RNA
gccgcccttctgccggatgc

SEQ ID NO: 2542 - RNA, 20 nt, synthetic construct
  misc_feature 1..20: note = Synthetic
  source 1..20: mol_type = other RNA
ggaggggcccttcggcacgc

SEQ ID NO: 2543 - RNA, 20 nt, synthetic construct
  misc_feature 1..20: note = Synthetic
  source 1..20: mol_type = other RNA
ggctgtgcaacttcgtggag

SEQ ID NO: 2544 - RNA, 20 nt, synthetic construct
  misc_feature 1..20: note = Synthetic
  source 1..20: mol_type = other RNA
tgtgcaacttcgtggagagg

SEQ ID NO: 2545 - RNA, 20 nt, synthetic construct
  misc_feature 1..20: note = Synthetic
  source 1..20: mol_type = other RNA
gctgaactatcggtatcacc

SEQ ID NO: 2546 - RNA, 20 nt, synthetic construct
  misc_feature 1..20: note = Synthetic
  source 1..20: mol_type = other RNA
agtgtttggactggtagcca

SEQ ID NO: 2547 - RNA, 20 nt, synthetic construct
  misc_feature 1..20: note = Synthetic
  source 1..20: mol_type = other RNA
actgcagctggtaccgagga

SEQ ID NO: 2548 - RNA, 20 nt, synthetic construct
  misc_feature 1..20: note = Synthetic
  source 1..20: mol_type = other RNA
ctcgggctcatcgtgctcct

SEQ ID NO: 2549 - RNA, 20 nt, synthetic construct
  misc_feature 1..20: note = Synthetic
  source 1..20: mol_type = other RNA
gttggccattacctgtcagc

SEQ ID NO: 2550 - RNA, 20 nt, synthetic construct
  misc_feature 1..20: note = Synthetic
  source 1..20: mol_type = other RNA
tcaccctctcccagcgcaag

SEQ ID NO: 2551 - RNA, 20 nt, synthetic construct
  misc_feature 1..20: note = Synthetic
  source 1..20: mol_type = other RNA
ccaaacactacgcctgcatc

SEQ ID NO: 2552 - RNA, 20 nt, synthetic construct
  misc_feature 1..20: note = Synthetic
  source 1..20: mol_type = other RNA
accgatgtcggagttgcaga

SEQ ID NO: 2553 - RNA, 20 nt, synthetic construct
  misc_feature 1..20: note = Synthetic
  source 1..20: mol_type = other RNA
gatagttcagccccttgcgc

SEQ ID NO: 2554 - RNA, 20 nt, synthetic construct
  misc_feature 1..20: note = Synthetic
  source 1..20: mol_type = other RNA
gtagccagggtaaccgaaat

SEQ ID NO: 2555 - RNA, 20 nt, synthetic construct
  misc_feature 1..20: note = Synthetic
  source 1..20: mol_type = other RNA
tgcagtagccgcccttctgc

SEQ ID NO: 2556 - RNA, 20 nt, synthetic construct
  misc_feature 1..20: note = Synthetic
  source 1..20: mol_type = other RNA
tatccgggggggcccatcct

SEQ ID NO: 2557 - RNA, 20 nt, synthetic construct
  misc_feature 1..20: note = Synthetic
  source 1..20: mol_type = other RNA
ctgcagctggtaccgaggat

SEQ ID NO: 2558 - RNA, 20 nt, synthetic construct
  misc_feature 1..20: note = Synthetic
  source 1..20: mol_type = other RNA
tttgggatcattgccctgtg

SEQ ID NO: 2559 - RNA, 20 nt, synthetic construct
  misc_feature 1..20: note = Synthetic
  source 1..20: mol_type = other RNA
cagcaaaccctcaagctgag

SEQ ID NO: 2560 - RNA, 20 nt, synthetic construct
  misc_feature 1..20: note = Synthetic
  source 1..20: mol_type = other RNA
ggtgtgggtgaggagcacat

SEQ ID NO: 2561 - RNA, 20 nt, synthetic construct
  misc_feature 1..20: note = Synthetic
  source 1..20: mol_type = other RNA
ggctacaggcttgtcactcg

SEQ ID NO: 2562 - RNA, 20 nt, synthetic construct
  misc_feature 1..20: note = Synthetic
  source 1..20: mol_type = other RNA
tctggtaggagacggcgatg

SEQ ID NO: 2563 - RNA, 20 nt, synthetic construct
  misc_feature 1..20: note = Synthetic
  source 1..20: mol_type = other RNA
ggcgctccccaagaagacag

SEQ ID NO: 2564 - RNA, 20 nt, synthetic construct
  misc_feature 1..20: note = Synthetic
  source 1..20: mol_type = other RNA
gcgctccccaagaagacagg

SEQ ID NO: 2565 - RNA, 20 nt, synthetic construct
  misc_feature 1..20: note = Synthetic
  source 1..20: mol_type = other RNA
aagcaccgcctggagccctg

SEQ ID NO: 2566 - RNA, 20 nt, synthetic construct
  misc_feature 1..20: note = Synthetic
  source 1..20: mol_type = other RNA
ttggagtgatcggcccccag

SEQ ID NO: 2567 - RNA, 20 nt, synthetic construct
  misc_feature 1..20: note = Synthetic
  source 1..20: mol_type = other RNA
ccaggagggcattggcccgg

SEQ ID NO: 2568 - RNA, 20 nt, synthetic construct
  misc_feature 1..20: note = Synthetic
  source 1..20: mol_type = other RNA
gtgcagcaggcagaagagcg

SEQ ID NO: 2569 - RNA, 20 nt, synthetic construct
  misc_feature 1..20: note = Synthetic
  source 1..20: mol_type = other RNA
ccagagggctgattagagag

SEQ ID NO: 2570 - RNA, 20 nt, synthetic construct
  misc_feature 1..20: note = Synthetic
  source 1..20: mol_type = other RNA
gtgggtgaggagcacatggg

SEQ ID NO: 2571 - RNA, 20 nt, synthetic construct
  misc_feature 1..20: note = Synthetic
  source 1..20: mol_type = other RNA
gctgaggaacaagcaccgcc

SEQ ID NO: 2572 - RNA, 20 nt, synthetic construct
  misc_feature 1..20: note = Synthetic
  source 1..20: mol_type = other RNA
tggagtgatcggcccccaga

SEQ ID NO: 2573 - RNA, 20 nt, synthetic construct
  misc_feature 1..20: note = Synthetic
  source 1..20: mol_type = other RNA
tgattagagagaggtccctg

SEQ ID NO: 2574 - RNA, 20 nt, synthetic construct
  misc_feature 1..20: note = Synthetic
  source 1..20: mol_type = other RNA
gctgagagataaccagctgg

SEQ ID NO: 2575 - RNA, 20 nt, synthetic construct
  misc_feature 1..20: note = Synthetic
  source 1..20: mol_type = other RNA
ggtgggaatatacccctcag

SEQ ID NO: 2576 - RNA, 20 nt, synthetic construct
  misc_feature 1..20: note = Synthetic
  source 1..20: mol_type = other RNA
gtggaccgggacaccgtgtg

SEQ ID NO: 2577 - RNA, 20 nt, synthetic construct
  misc_feature 1..20: note = Synthetic
  source 1..20: mol_type = other RNA
ccacggcgtacagcgtcgcg

SEQ ID NO: 2578 - RNA, 20 nt, synthetic construct
  misc_feature 1..20: note = Synthetic
  source 1..20: mol_type = other RNA
taatgtatcgctaccaacgg

SEQ ID NO: 2579 - RNA, 20 nt, synthetic construct
  misc_feature 1..20: note = Synthetic
  source 1..20: mol_type = other RNA
agaggtgcacggtcccattg

SEQ ID NO: 2580 - RNA, 20 nt, synthetic construct
  misc_feature 1..20: note = Synthetic
  source 1..20: mol_type = other RNA
aaagttgggacagtcaccgg

SEQ ID NO: 2581 - RNA, 20 nt, synthetic construct
  misc_feature 1..20: note = Synthetic
  source 1..20: mol_type = other RNA
aggtggcaccaccctatcag

SEQ ID NO: 2582 - RNA, 20 nt, synthetic construct
  misc_feature 1..20: note = Synthetic
  source 1..20: mol_type = other RNA
ggtggcaccaccctatcagg

SEQ ID NO: 2583 - RNA, 20 nt, synthetic construct
  misc_feature 1..20: note = Synthetic
  source 1..20: mol_type = other RNA
tgcgctggaaggaattcgtg

SEQ ID NO: 2584 - RNA, 20 nt, synthetic construct
  misc_feature 1..20: note = Synthetic
  source 1..20: mol_type = other RNA
gaattccttccagcgcaacg

SEQ ID NO: 2585 - RNA, 20 nt, synthetic construct
  misc_feature 1..20: note = Synthetic
  source 1..20: mol_type = other RNA
acagcatgctggcgacctgg

SEQ ID NO: 2586 - RNA, 20 nt, synthetic construct
  misc_feature 1..20: note = Synthetic
  source 1..20: mol_type = other RNA
ttggtgggaatatacccctc

SEQ ID NO: 2587 - RNA, 20 nt, synthetic construct
  misc_feature 1..20: note = Synthetic
  source 1..20: mol_type = other RNA
gaccagtccaataacccctg

SEQ ID NO: 2588 - RNA, 20 nt, synthetic construct
  misc_feature 1..20: note = Synthetic
  source 1..20: mol_type = other RNA
agagcttggacttccaccgt

SEQ ID NO: 2589 - RNA, 20 nt, synthetic construct
  misc_feature 1..20: note = Synthetic
  source 1..20: mol_type = other RNA
ctttgcggctccccgcagag

SEQ ID NO: 2590 - RNA, 20 nt, synthetic construct
  misc_feature 1..20: note = Synthetic
  source 1..20: mol_type = other RNA
aattccttccagcgcaacgg

SEQ ID NO: 2591 - RNA, 20 nt, synthetic construct
  misc_feature 1..20: note = Synthetic
  source 1..20: mol_type = other RNA
tggactggtccctcacctag

SEQ ID NO: 2592 - RNA, 20 nt, synthetic construct
  misc_feature 1..20: note = Synthetic
  source 1..20: mol_type = other RNA
cagctgctccaaatgccgaa

SEQ ID NO: 2593 - RNA, 20 nt, synthetic construct
  misc_feature 1..20: note = Synthetic
  source 1..20: mol_type = other RNA
gtttaatgtatcgctaccaa

SEQ ID NO: 2594 - RNA, 20 nt, synthetic construct
  misc_feature 1..20: note = Synthetic
  source 1..20: mol_type = other RNA
gggtcagccccctgataggg

SEQ ID NO: 2595 - RNA, 20 nt, synthetic construct
  misc_feature 1..20: note = Synthetic
  source 1..20: mol_type = other RNA
cgcgacgctgtacgccgtgg

SEQ ID NO: 2596 - RNA, 20 nt, synthetic construct
  misc_feature 1..20: note = Synthetic
  source 1..20: mol_type = other RNA
tgagcgaccacgagatcgat

SEQ ID NO: 2597 - RNA, 20 nt, synthetic construct
  misc_feature 1..20: note = Synthetic
  source 1..20: mol_type = other RNA
tccagcgtggcctcgcgccg

SEQ ID NO: 2598 - RNA, 20 nt, synthetic construct
  misc_feature 1..20: note = Synthetic
  source 1..20: mol_type = other RNA
gacatcgaggaggcgctttg

SEQ ID NO: 2599 - RNA, 20 nt, synthetic construct
  misc_feature 1..20: note = Synthetic
  source 1..20: mol_type = other RNA
tggtgggaatatacccctca

SEQ ID NO: 2600 - RNA, 20 nt, synthetic construct
  misc_feature 1..20: note = Synthetic
  source 1..20: mol_type = other RNA
tggacagtcattgtacaagt

SEQ ID NO: 2601 - RNA, 20 nt, synthetic construct
  misc_feature 1..20: note = Synthetic
  source 1..20: mol_type = other RNA
aggaactactactaagcccc

SEQ ID NO: 2602 - RNA, 20 nt, synthetic construct
  misc_feature 1..20: note = Synthetic
  source 1..20: mol_type = other RNA
ctgcggggagccgcaaagtt

SEQ ID NO: 2603 - RNA, 20 nt, synthetic construct
  misc_feature 1..20: note = Synthetic
  source 1..20: mol_type = other RNA
cggtgactgtcccaactttg

SEQ ID NO: 2604 - RNA, 20 nt, synthetic construct
  misc_feature 1..20: note = Synthetic
  source 1..20: mol_type = other RNA
cgggggcacgttctccacca

SEQ ID NO: 2605 - RNA, 20 nt, synthetic construct
  misc_feature 1..20: note = Synthetic
  source 1..20: mol_type = other RNA
acgaattccttccagcgcaa

SEQ ID NO: 2606 - RNA, 20 nt, synthetic construct
  misc_feature 1..20: note = Synthetic
  source 1..20: mol_type = other RNA
cgtgcccccgttgcgctgga

SEQ ID NO: 2607 - RNA, 20 nt, synthetic construct
  misc_feature 1..20: note = Synthetic
  source 1..20: mol_type = other RNA
aatacagcatgctggcgacc

SEQ ID NO: 2608 - RNA, 20 nt, synthetic construct
  misc_feature 1..20: note = Synthetic
  source 1..20: mol_type = other RNA
cgagggctgtcgcaaggatg

SEQ ID NO: 2609 - RNA, 20 nt, synthetic construct
  misc_feature 1..20: note = Synthetic
  source 1..20: mol_type = other RNA
gaggtggcaccaccctatca

SEQ ID NO: 2610 - RNA, 20 nt, synthetic construct
  misc_feature 1..20: note = Synthetic
  source 1..20: mol_type = other RNA
aagtccaagctctactccat

SEQ ID NO: 2611 - RNA, 20 nt, synthetic construct
  misc_feature 1..20: note = Synthetic
  source 1..20: mol_type = other RNA
tgcagccacacacggtgtcc

SEQ ID NO: 2612 - RNA, 20 nt, synthetic construct
  misc_feature 1..20: note = Synthetic
  source 1..20: mol_type = other RNA
accagtccaataacccctga

SEQ ID NO: 2613 - RNA, 20 nt, synthetic construct
  misc_feature 1..20: note = Synthetic
  source 1..20: mol_type = other RNA
cgaggcgcaatacagcatgc

SEQ ID NO: 2614 - RNA, 20 nt, synthetic construct
  misc_feature 1..20: note = Synthetic
  source 1..20: mol_type = other RNA
accacggcgtacagcgtcgc

SEQ ID NO: 2615 - RNA, 20 nt, synthetic construct
  misc_feature 1..20: note = Synthetic
  source 1..20: mol_type = other RNA
tacttgtacaatgactgtcc

SEQ ID NO: 2616 - RNA, 20 nt, synthetic construct
  misc_feature 1..20: note = Synthetic
  source 1..20: mol_type = other RNA
caccacggcgtacagcgtcg

SEQ ID NO: 2617 - RNA, 20 nt, synthetic construct
  misc_feature 1..20: note = Synthetic
  source 1..20: mol_type = other RNA
gaacgggcgctgcctgcgcg

SEQ ID NO: 2618 - RNA, 20 nt, synthetic construct
  misc_feature 1..20: note = Synthetic
  source 1..20: mol_type = other RNA
gcgagggctgtcgcaaggat

SEQ ID NO: 2619 - RNA, 20 nt, synthetic construct
  misc_feature 1..20: note = Synthetic
  source 1..20: mol_type = other RNA
agctgctccaaatgccgaaa

SEQ ID NO: 2620 - RNA, 20 nt, synthetic construct
  misc_feature 1..20: note = Synthetic
  source 1..20: mol_type = other RNA
ctcaccaatggagtagagct

SEQ ID NO: 2621 - RNA, 20 nt, synthetic construct
  misc_feature 1..20: note = Synthetic
  source 1..20: mol_type = other RNA
acagtcaccgggggtatagg

SEQ ID NO: 2622 - RNA, 20 nt, synthetic construct
  misc_feature 1..20: note = Synthetic
  source 1..20: mol_type = other RNA
tgcagtccgtatcctgcccc

SEQ ID NO: 2623 - RNA, 20 nt, synthetic construct
  misc_feature 1..20: note = Synthetic
  source 1..20: mol_type = other RNA
cgtgttggagaacgtccccg

SEQ ID NO: 2624 - RNA, 20 nt, synthetic construct
  misc_feature 1..20: note = Synthetic
  source 1..20: mol_type = other RNA
ttgcctgccgataaggcccg

SEQ ID NO: 2625 - RNA, 20 nt, synthetic construct
  misc_feature 1..20: note = Synthetic
  source 1..20: mol_type = other RNA
gtggggcctgcaaatatccg

SEQ ID NO: 2626 - RNA, 20 nt, synthetic construct
  misc_feature 1..20: note = Synthetic
  source 1..20: mol_type = other RNA
gtgctgcagcaaatgctcgc

SEQ ID NO: 2627 - RNA, 20 nt, synthetic construct
  misc_feature 1..20: note = Synthetic
  source 1..20: mol_type = other RNA
cccgggcggcacttgcgcag

SEQ ID NO: 2628 - RNA, 20 nt, synthetic construct
  misc_feature 1..20: note = Synthetic
  source 1..20: mol_type = other RNA
ggggacctgctcgtccttcg

SEQ ID NO: 2629 - RNA, 20 nt, synthetic construct
  misc_feature 1..20: note = Synthetic
  source 1..20: mol_type = other RNA
ctccagtccgacggccagcg

SEQ ID NO: 2630 - RNA, 20 nt, synthetic construct
  misc_feature 1..20: note = Synthetic
  source 1..20: mol_type = other RNA
gtactgcgcgctgagcaagc

SEQ ID NO: 2631 - RNA, 20 nt, synthetic construct
  misc_feature 1..20: note = Synthetic
  source 1..20: mol_type = other RNA
aggaactgaaacatcagacg

SEQ ID NO: 2632 - RNA, 20 nt, synthetic construct
  misc_feature 1..20: note = Synthetic
  source 1..20: mol_type = other RNA
gtaacgtggtggccatccct

SEQ ID NO: 2633 - RNA, 20 nt, synthetic construct
  misc_feature 1..20: note = Synthetic
  source 1..20: mol_type = other RNA
gataaggcccggggtacaca

SEQ ID NO: 2634 - RNA, 20 nt, synthetic construct
  misc_feature 1..20: note = Synthetic
  source 1..20: mol_type = other RNA
gcctgtggctggttccgagt

SEQ ID NO: 2635 - RNA, 20 nt, synthetic construct
  misc_feature 1..20: note = Synthetic
  source 1..20: mol_type = other RNA
tgcctgtggctggttccgag

SEQ ID NO: 2636 - RNA, 20 nt, synthetic construct
  misc_feature 1..20: note = Synthetic
  source 1..20: mol_type = other RNA
ggcatttacaccctacgccc

SEQ ID NO: 2637 - RNA, 20 nt, synthetic construct
  misc_feature 1..20: note = Synthetic
  source 1..20: mol_type = other RNA
tctcgctgctctagaccagg

SEQ ID NO: 2638 - RNA, 20 nt, synthetic construct
  misc_feature 1..20: note = Synthetic
  source 1..20: mol_type = other RNA
gcggttctgttcccgagtgc

SEQ ID NO: 2639 - RNA, 20 nt, synthetic construct
  misc_feature 1..20: note = Synthetic
  source 1..20: mol_type = other RNA
gtcgtgttggagaacgtccc

SEQ ID NO: 2640 - RNA, 20 nt, synthetic construct
  misc_feature 1..20: note = Synthetic
  source 1..20: mol_type = other RNA
ccacccggagtatggcccca

SEQ ID NO: 2641 - RNA, 20 nt, synthetic construct
  misc_feature 1..20: note = Synthetic
  source 1..20: mol_type = other RNA
cacccggagtatggccccag

SEQ ID NO: 2642 - RNA, 20 nt, synthetic construct
  misc_feature 1..20: note = Synthetic
  source 1..20: mol_type = other RNA
cgtccttcggggactccgag

SEQ ID NO: 2643 - RNA, 20 nt, synthetic construct
  misc_feature 1..20: note = Synthetic
  source 1..20: mol_type = other RNA
ggagtcacacacggtgtccg

SEQ ID NO: 2644 - RNA, 20 nt, synthetic construct
  misc_feature 1..20: note = Synthetic
  source 1..20: mol_type = other RNA
gagaacgtccccggggcaca

SEQ ID NO: 2645 - RNA, 20 nt, synthetic construct
  misc_feature 1..20: note = Synthetic
  source 1..20: mol_type = other RNA
tcgtgttggagaacgtcccc

SEQ ID NO: 2646 - RNA, 20 nt, synthetic construct
  misc_feature 1..20: note = Synthetic
  source 1..20: mol_type = other RNA
acttgcctgccgataaggcc

SEQ ID NO: 2647 - RNA, 20 nt, synthetic construct
  misc_feature 1..20: note = Synthetic
  source 1..20: mol_type = other RNA
cagacggcgacgggcgccat

SEQ ID NO: 2648 - RNA, 20 nt, synthetic construct
  misc_feature 1..20: note = Synthetic
  source 1..20: mol_type = other RNA
ctccaacacgacttcatcca

SEQ ID NO: 2649 - RNA, 20 nt, synthetic construct
  misc_feature 1..20: note = Synthetic
  source 1..20: mol_type = other RNA
ctggggccatactccgggtg

SEQ ID NO: 2650 - RNA, 20 nt, synthetic construct
  misc_feature 1..20: note = Synthetic
  source 1..20: mol_type = other RNA
cctggggccatactccgggt

SEQ ID NO: 2651 - RNA, 20 nt, synthetic construct
  misc_feature 1..20: note = Synthetic
  source 1..20: mol_type = other RNA
cacgtcccccacccggagta

SEQ ID NO: 2652 - RNA, 20 nt, synthetic construct
  misc_feature 1..20: note = Synthetic
  source 1..20: mol_type = other RNA
ggggtaagtgtactgcccct

SEQ ID NO: 2653 - RNA, 20 nt, synthetic construct
  misc_feature 1..20: note = Synthetic
  source 1..20: mol_type = other RNA
cccacccggagtatggcccc

SEQ ID NO: 2654 - RNA, 20 nt, synthetic construct
  misc_feature 1..20: note = Synthetic
  source 1..20: mol_type = other RNA
cttgcctgccgataaggccc

SEQ ID NO: 2655 - RNA, 20 nt, synthetic construct
  misc_feature 1..20: note = Synthetic
  source 1..20: mol_type = other RNA
ctcgtccttcggggactccg

SEQ ID NO: 2656 - RNA, 20 nt, synthetic construct
  misc_feature 1..20: note = Synthetic
  source 1..20: mol_type = other RNA
cgtagggtgtaaatgccacc

SEQ ID NO: 2657 - RNA, 20 nt, synthetic construct
  misc_feature 1..20: note = Synthetic
  source 1..20: mol_type = other RNA
ccgctgcgcaagtgccgccc

SEQ ID NO: 2658 - RNA, 20 nt, synthetic construct
  misc_feature 1..20: note = Synthetic
  source 1..20: mol_type = other RNA
aggactcagctactcacatc

SEQ ID NO: 2659 - RNA, 20 nt, synthetic construct
  misc_feature 1..20: note = Synthetic
  source 1..20: mol_type = other RNA
gatggccaccacgttacagc

SEQ ID NO: 2660 - RNA, 20 nt, synthetic construct
  misc_feature 1..20: note = Synthetic
  source 1..20: mol_type = other RNA
tgtaacgtggtggccatccc

SEQ ID NO: 2661 - RNA, 20 nt, synthetic construct
  misc_feature 1..20: note = Synthetic
  source 1..20: mol_type = other RNA
ccctggggccatactccggg

SEQ ID NO: 2662 - RNA, 20 nt, synthetic construct
  misc_feature 1..20: note = Synthetic
  source 1..20: mol_type = other RNA
acttcttgcgacttaccaac

SEQ ID NO: 2663 - RNA, 20 nt, synthetic construct
  misc_feature 1..20: note = Synthetic
  source 1..20: mol_type = other RNA
gccttatcggcaggcaagtg

SEQ ID NO: 2664 - RNA, 20 nt, synthetic construct
  misc_feature 1..20: note = Synthetic
  source 1..20: mol_type = other RNA
gtaccccgggccttatcggc

SEQ ID NO: 2665 - RNA, 20 nt, synthetic construct
  misc_feature 1..20: note = Synthetic
  source 1..20: mol_type = other RNA
cgataaggcccggggtacac

SEQ ID NO: 2666 - RNA, 20 nt, synthetic construct
  misc_feature 1..20: note = Synthetic
  source 1..20: mol_type = other RNA
tggacagaagggcgcccact

SEQ ID NO: 2667 - RNA, 20 nt, synthetic construct
  misc_feature 1..20: note = Synthetic
  source 1..20: mol_type = other RNA
agcccagagctccagtccga

SEQ ID NO: 2668 - RNA, 20 nt, synthetic construct
  misc_feature 1..20: note = Synthetic
  source 1..20: mol_type = other RNA
ctcccgggctccggggcgta

SEQ ID NO: 2669 - RNA, 20 nt, synthetic construct
  misc_feature 1..20: note = Synthetic
  source 1..20: mol_type = other RNA
gctcagcgcgcagtaccagc

SEQ ID NO: 2670 - RNA, 20 nt, synthetic construct
  misc_feature 1..20: note = Synthetic
  source 1..20: mol_type = other RNA
ggcgacttcgctcttccagt

SEQ ID NO: 2671 - RNA, 20 nt, synthetic construct
  misc_feature 1..20: note = Synthetic
  source 1..20: mol_type = other RNA
gtgcacgatctgatgcccgg

SEQ ID NO: 2672 - RNA, 20 nt, synthetic construct
  misc_feature 1..20: note = Synthetic
  source 1..20: mol_type = other RNA
tcagatcgtgcacgtccgcg

SEQ ID NO: 2673 - RNA, 20 nt, synthetic construct
  misc_feature 1..20: note = Synthetic
  source 1..20: mol_type = other RNA
gcacgatctgatgcccggcg

SEQ ID NO: 2674 - RNA, 20 nt, synthetic construct
  misc_feature 1..20: note = Synthetic
  source 1..20: mol_type = other RNA
ggtcggtctccgagtccccg

SEQ ID NO: 2675 - RNA, 20 nt, synthetic construct
  misc_feature 1..20: note = Synthetic
  source 1..20: mol_type = other RNA
catcagatcgtgcacgtccg

SEQ ID NO: 2676 - RNA, 20 nt, synthetic construct
  misc_feature 1..20: note = Synthetic
  source 1..20: mol_type = other RNA
tgttggtaactggctacgca

SEQ ID NO: 2677 - RNA, 20 nt, synthetic construct
  misc_feature 1..20: note = Synthetic
  source 1..20: mol_type = other RNA
gggcaacgaggttacctgtc

SEQ ID NO: 2678 - RNA, 20 nt, synthetic construct
  misc_feature 1..20: note = Synthetic
  source 1..20: mol_type = other RNA
ggggcaacgaggttacctgt

SEQ ID NO: 2679 - RNA, 20 nt, synthetic construct
  misc_feature 1..20: note = Synthetic
  source 1..20: mol_type = other RNA
ggttgcccgggtccggacgg

SEQ ID NO: 2680 - RNA, 20 nt, synthetic construct
  misc_feature 1..20: note = Synthetic
  source 1..20: mol_type = other RNA
acgaggttacctgtcgggag

SEQ ID NO: 2681 - RNA, 20 nt, synthetic construct
  misc_feature 1..20: note = Synthetic
  source 1..20: mol_type = other RNA
acgatctgatgcccggcggg

SEQ ID NO: 2682 - RNA, 20 nt, synthetic construct
  misc_feature 1..20: note = Synthetic
  source 1..20: mol_type = other RNA
gggctccggcggcttgaaga

SEQ ID NO: 2683 - RNA, 20 nt, synthetic construct
  misc_feature 1..20: note = Synthetic
  source 1..20: mol_type = other RNA
gtgttggtaactggctacgc

SEQ ID NO: 2684 - RNA, 20 nt, synthetic construct
  misc_feature 1..20: note = Synthetic
  source 1..20: mol_type = other RNA
ggaagtcatctggggttcga

SEQ ID NO: 2685 - RNA, 20 nt, synthetic construct
  misc_feature 1..20: note = Synthetic
  source 1..20: mol_type = other RNA
atcagatcgtgcacgtccgc

SEQ ID NO: 2686 - RNA, 20 nt, synthetic construct
  misc_feature 1..20: note = Synthetic
  source 1..20: mol_type = other RNA
cggggactcggagaccgacc

SEQ ID NO: 2687 - RNA, 20 nt, synthetic construct
  misc_feature 1..20: note = Synthetic
  source 1..20: mol_type = other RNA
atgaacctttaccaaaacga

SEQ ID NO: 2688 - RNA, 20 nt, synthetic construct
  misc_feature 1..20: note = Synthetic
  source 1..20: mol_type = other RNA
gatgaacctttaccaaaacg

SEQ ID NO: 2689 - RNA, 20 nt, synthetic construct
  misc_feature 1..20: note = Synthetic
  source 1..20: mol_type = other RNA
gccggttgcccgggtccgga

SEQ ID NO: 2690 - RNA, 20 nt, synthetic construct
  misc_feature 1..20: note = Synthetic
  source 1..20: mol_type = other RNA
gccgtccggacccgggcaac

SEQ ID NO: 2691 - RNA, 20 nt, synthetic construct
  misc_feature 1..20: note = Synthetic
  source 1..20: mol_type = other RNA
tgcacgatctgatgcccggc

SEQ ID NO: 2692 - RNA, 20 nt, synthetic construct
  misc_feature 1..20: note = Synthetic
  source 1..20: mol_type = other RNA
gacgtgcacgatctgatgcc

SEQ ID NO: 2693 - RNA, 20 nt, synthetic construct
  misc_feature 1..20: note = Synthetic
  source 1..20: mol_type = other RNA
ggactcggagaccgacctgg

SEQ ID NO: 2694 - RNA, 20 nt, synthetic construct
  misc_feature 1..20: note = Synthetic
  source 1..20: mol_type = other RNA
cgaggttacctgtcgggagt

SEQ ID NO: 2695 - RNA, 20 nt, synthetic construct
  misc_feature 1..20: note = Synthetic
  source 1..20: mol_type = other RNA
acccgggcaaccggcacccg

SEQ ID NO: 2696 - RNA, 20 nt, synthetic construct
  misc_feature 1..20: note = Synthetic
  source 1..20: mol_type = other RNA
gcccaaatcccactcccgac

SEQ ID NO: 2697 - RNA, 20 nt, synthetic construct
  misc_feature 1..20: note = Synthetic
  source 1..20: mol_type = other RNA
cgatcagacaacaacatggc

SEQ ID NO: 2698 - RNA, 20 nt, synthetic construct
  misc_feature 1..20: note = Synthetic
  source 1..20: mol_type = other RNA
agcccacagggaggcgtcat

SEQ ID NO: 2699 - RNA, 20 nt, synthetic construct
  misc_feature 1..20: note = Synthetic
  source 1..20: mol_type = other RNA
gttgaagagcgcctccaggt

SEQ ID NO: 2700 - RNA, 20 nt, synthetic construct
  misc_feature 1..20: note = Synthetic
  source 1..20: mol_type = other RNA
ggggcacgttggccgtcttg

SEQ ID NO: 2701 - RNA, 20 nt, synthetic construct
  misc_feature 1..20: note = Synthetic
  source 1..20: mol_type = other RNA
acatcgatcagacaacaaca

SEQ ID NO: 2702 - RNA, 20 nt, synthetic construct
  misc_feature 1..20: note = Synthetic
  source 1..20: mol_type = other RNA
aacggttctgctgtgagggc

SEQ ID NO: 2703 - RNA, 20 nt, synthetic construct
  misc_feature 1..20: note = Synthetic
  source 1..20: mol_type = other RNA
gttgcccgggtccggacggc

SEQ ID NO: 2704 - RNA, 20 nt, synthetic construct
  misc_feature 1..20: note = Synthetic
  source 1..20: mol_type = other RNA
tggggcacgttggccgtctt

SEQ ID NO: 2705 - RNA, 20 nt, synthetic construct
  misc_feature 1..20: note = Synthetic
  source 1..20: mol_type = other RNA
gggtgccggttgcccgggtc

SEQ ID NO: 2706 - RNA, 20 nt, synthetic construct
  misc_feature 1..20: note = Synthetic
  source 1..20: mol_type = other RNA
cagggcccgccgtccggacc

SEQ ID NO: 2707 - RNA, 20 nt, synthetic construct
  misc_feature 1..20: note = Synthetic
  source 1..20: mol_type = other RNA
agggcccgccgtccggaccc

SEQ ID NO: 2708 - RNA, 20 nt, synthetic construct
  misc_feature 1..20: note = Synthetic
  source 1..20: mol_type = other RNA
cgactccttcttcaagccgc

SEQ ID NO: 2709 - RNA, 20 nt, synthetic construct
  misc_feature 1..20: note = Synthetic
  source 1..20: mol_type = other RNA
taataggccagtactgatgc

SEQ ID NO: 2710 - RNA, 20 nt, synthetic construct
  misc_feature 1..20: note = Synthetic
  source 1..20: mol_type = other RNA
gggggctgtgacgttcatct

SEQ ID NO: 2711 - RNA, 20 nt, synthetic construct
  misc_feature 1..20: note = Synthetic
  source 1..20: mol_type = other RNA
cacgatctgatgcccggcgg

SEQ ID NO: 2712 - RNA, 20 nt, synthetic construct
  misc_feature 1..20: note = Synthetic
  source 1..20: mol_type = other RNA
ccaaggcttgaccctcgttt

SEQ ID NO: 2713 - RNA, 20 nt, synthetic construct
  misc_feature 1..20: note = Synthetic
  source 1..20: mol_type = other RNA
gccgcgggtgccggttgccc

SEQ ID NO: 2714 - RNA, 20 nt, synthetic construct
  misc_feature 1..20: note = Synthetic
  source 1..20: mol_type = other RNA
cgtgcacgtccgcggggact

SEQ ID NO: 2715 - RNA, 20 nt, synthetic construct
  misc_feature 1..20: note = Synthetic
  source 1..20: mol_type = other RNA
aatatgatgaactcggcttc

SEQ ID NO: 2716 - RNA, 20 nt, synthetic construct
  misc_feature 1..20: note = Synthetic
  source 1..20: mol_type = other RNA
cgccgcgggtgccggttgcc

SEQ ID NO: 2717 - RNA, 20 nt, synthetic construct
  misc_feature 1..20: note = Synthetic
  source 1..20: mol_type = other RNA
gctcagatcctttccttaac

SEQ ID NO: 2718 - RNA, 20 nt, synthetic construct
  misc_feature 1..20: note = Synthetic
  source 1..20: mol_type = other RNA
ctggggcacgttggccgtct

SEQ ID NO: 2719 - RNA, 20 nt, synthetic construct
  misc_feature 1..20: note = Synthetic
  source 1..20: mol_type = other RNA
cagagacagatgatcaatgg

SEQ ID NO: 2720 - RNA, 20 nt, synthetic construct
  misc_feature 1..20: note = Synthetic
  source 1..20: mol_type = other RNA
gccatagcttacatgataga

SEQ ID NO: 2721 - RNA, 20 nt, synthetic construct
  misc_feature 1..20: note = Synthetic
  source 1..20: mol_type = other RNA
tgatggccctaaacagatga

SEQ ID NO: 2722 - RNA, 20 nt, synthetic construct
  misc_feature 1..20: note = Synthetic
  source 1..20: mol_type = other RNA
ggtggtcggagattcgtagc

SEQ ID NO: 2723 - RNA, 20 nt, synthetic construct
  misc_feature 1..20: note = Synthetic
  source 1..20: mol_type = other RNA
acctatcttcttcgacacat

SEQ ID NO: 2724 - RNA, 20 nt, synthetic construct
  misc_feature 1..20: note = Synthetic
  source 1..20: mol_type = other RNA
cttcgacacatgggataacg

SEQ ID NO: 2725 - RNA, 20 nt, synthetic construct
  misc_feature 1..20: note = Synthetic
  source 1..20: mol_type = other RNA
gtgcagttcagtgatcgtac

SEQ ID NO: 2726 - RNA, 20 nt, synthetic construct
  misc_feature 1..20: note = Synthetic
  source 1..20: mol_type = other RNA
tgaccatctctctctgaatc

SEQ ID NO: 2727 - RNA, 20 nt, synthetic construct
  misc_feature 1..20: note = Synthetic
  source 1..20: mol_type = other RNA
gacatcccagcttaccttca

SEQ ID NO: 2728 - RNA, 20 nt, synthetic construct
  misc_feature 1..20: note = Synthetic
  source 1..20: mol_type = other RNA
agtatagttcgacaaacagg

SEQ ID NO: 2729 - RNA, 20 nt, synthetic construct
  misc_feature 1..20: note = Synthetic
  source 1..20: mol_type = other RNA
tctgtaatgcagcagtcatg

SEQ ID NO: 2730 - RNA, 20 nt, synthetic construct
  misc_feature 1..20: note = Synthetic
  source 1..20: mol_type = other RNA
tgatggccctggaaatgtga

SEQ ID NO: 2731 - RNA, 20 nt, synthetic construct
  misc_feature 1..20: note = Synthetic
  source 1..20: mol_type = other RNA
actcttgttacagagctggt

SEQ ID NO: 2732 - protein, 1434 aa, synthetic construct
  REGION 1..1434: note = Synthetic
MDYKDHDGDYKDHDIDYKDDDDKMAPKKKRKVGIHGVPAADKKYSIGLDIGTNSVGWAVITDEYKVPSKKFKVLGNTDRHSIKKNLIGALLFDSGETAEATRLKRTARRRYTRRKNRICYLQEIFSNEMAKVDDSFFHRLEESFLVEEDKKHERHPIFGNIVDEVAYHEKYPTIYHLRKKLVDSTDKADLRLIYLALAHMIKFRGHFLIEGDLNPDNSDVDKLFIQLVQTYNQLFEENPINASGVDAKAILSARLSKSRRLENLIAQLPGEKKNGLFGNLIALSLGLTPNFKSNFDLAEDAKLQLSKDTYDDDLDNLLAQIGDQYADLFLAAKNLSDAILLSDILRVNTEITKAPLSASMIKRYDEHHQDLTLLKALVRQQLPEKYKEIFFDQSKNGYAGYIDGGASQEEFYKFIKPILEKMDGTEELLVKLNREDLLRKQRTFDNGSIPHQIHLGELHAILRRQEDFYPFLKDNREKIEKILTFRIPYYVGPLARGNSRFAWMTRKSEETITPWNFEEVVDKGASAQSFIERMTNFDKNLPNEKVLPKHSLLYEYFTVYNELTKVKYVTEGMRKPAFLSGEQKKAIVDLLFKTNRKVTVKQLKEDYFKKIECFDSVEISGVEDRFNASLGTYHDLLKIIKDKDFLDNEENEDILEDIVLTLTLFEDREMIEERLKTYAHLFDDKVMKQLKRRRYTGWGRLSRKLINGIRDKQSGKTILDFLKSDGFANRNFMQLIHDDSLTFKEDIQKAQVSGQGDSLHEHIANLAGSPAIKKGILQTVKVVDELVKVMGRHKPENIVIEMARENQTTQKGQKNSRERMKRIEEGIKELGSQILKEHPVENTQLQNEKLYLYYLQNGRDMYVDQELDINRLSDYDVDHIVPQSFLADDSIDNKVLTRSDKNRGKSDNVPSEEVVKKMKNYWRQLLNAKLITQRKFDNLTKAERGGLSELDKAGFIKRQLVETRQITKHVAQILDSRMNTKYDENDKLIREVKVITLKSKLVSDFRKDFQFYKVREINNYHHAHDAYLNAVVGTALIKKYPALESEFVYGDYKVYDVRKMIAKSEQEIGKATAKYFFYSNIMNFFKTEITLANGEIRKAPLIETNGETGEIVWDKGRDFATVRKVLSMPQVNIVKKTEVQTGGFSKESILPKRNSDKLIARKKDWDPKKYGGFDSPTVAYSVLVVAKVEKGKSKKLKSVKELLGITIMERSSFEKNPIDFLEAKGYKEVKKDLIIKLPKYSLFELENGRKRMLASAGELQKGNELALPSKYVNFLYLASHYEKLKGSPEDNEQKQLFVEQHKHYLDEIIEQISEFSKRVILADANLDKVLSAYNKHRDKPIREQAENIIHLFTLTNLGAPAAFKYFDTTIDRKRYTSTKEVLDATLIHQSITGLYETRIDLSQLGGDKRPAATKKAGQAKKKKAAALEHHHHHH

What is claimed is:

1. A pharmaceutical composition for treating a disorder, the composition comprising a plurality of lipid nanoparticles (LNPs) encapsulating:
(i) an RNA-guided nuclease or a nucleic acid encoding an RNA-guided nuclease; and
(ii) at least one guide RNA or a nucleic acid encoding at least one guide RNA targeting a gene selected from FGF2, CCN2, NGF, NTF3, NTF4, BDNF, FGFR1, NGFR, NTRK1, NTRK2, ADAM17, ADAMTS1, ADAMTS5, MMP1, MMP2, MMP3, MMP7, MMP8, MMP10, MMP12, MMP13, TIMP1, TIMP3 CXCL1, CXCL2, CXCL3, CXCL5, CXCL6, CXCL8, CCL2, CCL3, CCL5, CCL7, CCL20, IL1A, IL1B, IL4, IL6, IL10, IL13, IL17A, IL18, TNF, CXCR1, CXCR2, CCR7, TNFRSF1A, TNFRSF1B, IL1R1, IL1RAP, IL4R, IL6R, IL6ST IL10RA, IL10RB, IL13RA1, IL13RA2, IL17RA, IL18R1, IL18RAP, SCN1A, SCN2A, SCN3A, SCN4A, SCN5A, SCN8A, SCN9A, SCN10A, SCN11A, TAC1, TAC3, TACR1, TACR2, TACR3, ATP1A1, CALCA, CALCB, CALCRL, RAMP1, ADM, CRCP, YAP1, MRGPRX2, TGFB, TGFBR1, and TGFBR2.

2. The pharmaceutical composition of claim 1, wherein the at least one guide RNA comprises a crRNA sequence selected from any one of SEQ ID NOs: 1-2731.

3. The pharmaceutical composition of claim 1 or 2, wherein the disorder is a musculoskeletal disorder.

4. The pharmaceutical composition of claim 3, wherein the musculoskeletal disorder is selected from the group consisting of Rheumatoid Arthritis, Gout, Osteoarthritis, Osteoporosis, Intervertebral disc disease (IVDD), Psoriatic arthritis (PsA), Arthritis, Polymyositis, Proliferative synovitis, Malignant bone neoplasm, Sarcoid Myopathy, Cortex Bone Disorders, Idiopathic Scoliosis, Tendinopathy, Myofibrillar Myopathy, Enthesis-Related Arthritis, Ankylosing spondylitis, Degenerative, polyarthritis, Arthropathy, Osteitis Deformans, Prolapsed Lumbar Disc, Polymyositis Ossificans, Idiopathic Polymyositis, Luft Disease, Adult-onset Still's Disease, Osteoarthrosis Deformans, and Bachet's Disease.

5. The pharmaceutical composition of claim 3, wherein the musculoskeletal disorder is selected from the group consisting of Rheumatoid arthritis, Idiopathic osteoporosis, Post-menopausal osteoporosis, Paget's disease, Osteoarthritis, Juvenile idiopathic arthritis (JIA), Still's disease, Ankylosing spondylitis, Polymyalgia rheumatica, Arthritis, Secondary malignant neoplasm of bone, Type II, Mucolipidosis, Sjogren's Syndrome, Psoriatic arthritis, Rheumatism, Castleman's disease, Degenerative Polyarthritis, Arthropathy, Bone neoplasm, Osteoporosis, Massive osteolysis, Bone fracture healing, Systemic sclerosis, Systemic Juvenile Idiopathic, Arthritis, and Synovitis.

6. The pharmaceutical composition of claim 3, wherein the musculoskeletal disorder is selected from the group consisting of Arthritis, Infectious Intermittent joint effusion, Ankylosing spondylitis, Arthritis, Osteoarthritis, Spondylarthritis, Plantar fasciitis, Degenerative polyarthritis, Hemophilic arthropathy, Inflammatory myopathy with abundant macrophages, Polymyositis, Tendinosis, Malignant Bone Neoplasm, Osteoporosis, Psoriatic arthritis, Rheumatism, Rheumatoid arthritis, Adult Still's disease, Juvenile arthritis, Early rheumatoid arthritis, Palindromic rheumatism, Gout, Infectious Arthritis, Myotonic dystrophy, Dermatomyositis, Hemophilic arthropathy, Osteopenia, Sjogren's syndrome, Juvenile Idiopathic Arthritis, Myasthenia gravis, Osteolysis, Inflammation, Degenerative polyarthritis, Osteitis deformans, Pigmented villonodular synovitis, or Hyperphosphatasemia with bone disease.

7. The pharmaceutical composition of claim 3, wherein the musculoskeletal disorder is selected from the group consisting of Loeys-Dietz Syndrome, Osteoarthrosis, Marfan Syndrome, Aortic aneurysm (familial thoracic 3), and a Craniofacial abnormality.

8. The pharmaceutical composition of claim 1 or 2, wherein the disorder is a neoplasia.

9. The pharmaceutical composition of claim 8, wherein the neoplasia is selected from the group consisting of Osteosarcoma, Colon Cancer, Metastasis (General), Lung Cancer, Multiple Myeloma. Breast Cancer, Solid Tumors, Lymphoma, Pancreatic Cancer, Stomach Cancer, Epithelial Ovarian Cancer, Mammary Neoplasms, Oropharyngeal Carcinoma, Renal Cell Carcinoma, Chondrosarcoma, Esophageal Neoplasms, B-Cell Lymphoma, Cutaneous Lymphoma T-Cell, Leukemia, Thyroid Carcinoma, Skin carcinogenesis, Cholectoral Cancer, Glioma, Liver Cancer, Melanoma, Neuroblastoma, Polycystic Ovary Syndrome, Glioblastoma, Prostate Cancer, Cervical Cancer, Ovarian Cancer, Bladder Cancer, Squamous cell carcinoma, Kaposi Sarcoma, Oral Cavity Cancer, Leiomyosarcoma, Malignant Peripheral Nerve Sheath Tumor, and Ewing's Sarcoma.

10. The pharmaceutical composition of claim 8, wherein the neoplasia is selected from the group consisting of Multiple myeloma, Lung Cancer, Stomach Cancer, Breast Cancer, Kidney Cancer, Neoplasm Metastasis, Colorectal Neoplasms, Ovarian cancer, Osteosarcoma, Cholangiocarcinoma, Leukemia, Prostate cancer, Plasmacytoma, Pancreatic cancer, Cervical cancer, Lymphoma, Liver neoplasms, Neuroblastoma, Melanoma, Mastocytosis, Endometrial cancer, Bladder Cancer, Squamous cell carcinoma, Gallbladder carcinoma, Adenocarcinoma, Thyroid Cancer, prostate neoplasms, stomach cancer, liver carcinoma, pituitary neoplasms, hepatoblastoma, multiple myeloma, hepatocellular adenoma, breast carcinoma, carcinogenesis, leukemia, colon carcinoma, melanoma, metastasis (general), lung cancer, pancreatic cancer, Kaposi sarcoma, medulloblastoma, carcinoma of bladder, squamous cell carcinoma, mast cell neoplasm, glioma, mastocytoma, brain neoplasms, ovarian neoplasms, bone neoplasm, rhabdomyosarcoma, solid tumors, metastatic kidney cancer, and metastatic renal cell carcinoma

11. The pharmaceutical composition of claim 8, wherein the neoplasia is selected from the group consisting of a Neoplasm, Glioblastoma, Astrocytoma, Adenocarcinoma, Osteosarcoma, Squamous cell carcinoma, Metastasis, Ameloblastoma, Cholangiocarcinoma, Choriocarcinoma, Ovarian cancer, Prostate cancer, Lung Cancer, Larynx Cancer, Breast Cancer, Lip and Oral Cavity Carcinoma, Squamous intraepithelial lesion, Neuroblastoma, Non-Hodgkin lymphomas, Malignant Neoplasms, Skin Neoplasms, Neuroblastoma, Neoplasm Metastasis, Colorectal Cancer, Fibrosarcoma, Myeloid Leukemia, Myelofibrosis, Hodgkin Lymphomas, Non-Small Cell Lung Carcinoma, Cervical Cancer, Liver cancer, Extrapulmonary small cell carcinoma, Basal cell carcinoma, Kidney cancer, Pancreatic carcinoma, Mesothelioma, Gastric cancer, Polycystic Ovary Syndrome, Chordoma, Cholangiocarcinoma, Malignant ascites, Nasopharyngeal carcinoma, Head and Neck Carcinoma, Cancer metastasis, Prostate carcinoma, Fibrosarcoma, Liver carcinoma, Carcinoma of bladder, T-Cell Lymphoblastic Leukemia, Bladder Neoplasm, melanoma, Leukemia, acute myeloid leukemia, Hepatocellular carcinoma, Colorectal cancer, a Lymphoma, Mycosis fungoides, and Sezary syndrome.

12. The pharmaceutical composition of claim 8, wherein the neoplasia is selected from the group consisting of Pancreatic cancer, Multiple self-healing squamous epithelioma (Ferguson-Smith disease), Pancreatic cancer, Gastrointestinal Stromal Tumors (GIST), Hereditary Nonpolyposis Colorectal Cancer (Lynch Syndrome), Metastasis, Colorectal Carcinoma, Bone neoplasms, Anaplastic carcinoma, Spindle-Cell carcinoma, Malignant Bone Neoplasm, Lung neoplasms, and Malignant brain neoplasm.

13. The pharmaceutical composition of claim 1 or 2, wherein the disorder is a neurological disorder.

14. The pharmaceutical composition of claim 13, wherein the neurological disorder is selected from the group consisting of Acute Thrombotic Stroke, Epilepsy, Multiple Sclerosis, and Alzheimer's Disease.

15. The pharmaceutical composition of claim 1 or 2, wherein the disorder is a cardiac disorder.

16. The pharmaceutical composition of claim 15, wherein the cardiac disorder is selected from the group consisting of Acute Myocardial Infarction, refractory heart failure, arrhythmias, pericarditis, myocarditis, sepsis-induced cardiomyopathy, Acute Decompensated Heart Failure, Refractory Idiopathic Pericarditis, Atherosclerosis, coronary artery disease, myocardial infarction, and cardiac remodeling.

17. The pharmaceutical composition of claim 15, wherein the cardiac disorder is atherosclerosis or abdominal aortic aneurism.

18. The pharmaceutical composition of claim 1 or 2, wherein the disorder is an inflammatory disorder.

19. The pharmaceutical composition of claim 18, wherein the inflammatory disorder is selected from the group consisting of Autoinflammatory Disease (AID), Cryopyrin Associated Periodic syndrome (CAPS), Familial Mediterranean Fever (FMF), TNF-Receptor Associated Periodic Syndrome (TRAPS), Hyper-IgD Syndrome (HIDS), Systemic Lupus Erythematosus (SLE), and Fibrosis.

20. The pharmaceutical composition of claim 18, wherein the inflammatory disorder is selected from the group consisting of a cytokine storm, acute local inflammation, inflammatory bowel disease, Crohn's disease, sepsis, Experimental sepsis, and Castleman's disease

21. The pharmaceutical composition of claim 1 or 2, wherein the disorder is a digestive disorder.

22. The pharmaceutical composition of claim 21, wherein the digestive disorder is selected from the group consisting of Inflammatory Bowel Disease (IBD), Gastroesophageal reflux disease (GERD), and Non-HP-associated Peptic Ulcer Disease.

23. The pharmaceutical composition of claim 1 or 2, wherein the disorder is a respiratory disorder.

24. The pharmaceutical composition of claim 23, wherein the respiratory disorder is Asthma or Pulmonary Fibrosis.

25. The pharmaceutical composition of claim 1 or 2, wherein the disorder is a renal, metabolic, or ophthalmic disorder.

26. The pharmaceutical composition of claim 25, wherein the renal, metabolic, or ophthalmic disorder is selected from the group consisting of Chronic Kidney Disease, Type 2 Diabetes, an Eye Disease, Uveitis, Scleritis, Sjogren asthenia, and dry eye.

27. The pharmaceutical composition of claim 1 or 2, wherein the disorder is an autoimmune disorder.

28. The pharmaceutical composition of claim 27, wherein the autoimmune disorder is Systemic Lupus Erythematosus.

29. The pharmaceutical composition of claim 1 or 2, wherein the disorder is acute synovitis, chronic synovitis, inflammatory arthritis, or immune-mediated arthritides.

30. The pharmaceutical composition of claim 1 or 2, wherein the disorder is an autoimmune or inflammatory disorder.

31. The pharmaceutical composition of claim 29, wherein the autoimmune or inflammatory disorder is selected from the group consisting of an Allergy, Asthma, Multiple sclerosis, Psoriasis, Inflammatory bowel disease, Autoimmune experimental uveitis, Colitis, Hypersensitivity reaction disease, Diabetes, Crohn's disease, Systemic lupus erythematosus, Pulmonary sarcoidosis, Leishmaniasis, Experimental autoimmune encephalomyelitis, HTLV-1-associated myelopathy, Tropical spastic paraparesis, Scleroderma, an Idiopathic inflammatory myopathy, polymyositis, and dermatomyositis.

32. The pharmaceutical composition of any one of claims 1-31, wherein the RNA-guided nuclease or a nucleic acid encoding an RNA-guided nuclease is the RNA-guided nuclease.

33. The pharmaceutical composition of any one of claims 1-31, wherein the RNA-guided nuclease or a nucleic acid encoding an RNA-guided nuclease is DNA encoding the RNA-guided nuclease.

34. The pharmaceutical composition of any one of claims 1-31, wherein the RNA-guided nuclease or a nucleic acid encoding an RNA-guided nuclease is mRNA encoding the RNA-guided nuclease.

35. The pharmaceutical composition of any one of claims 1-34, wherein the RNA-guided nuclease is a Cas protein.

36. The pharmaceutical composition of claim 35, wherein the Cas protein is a Cas9 protein.

37. The pharmaceutical composition of claim 35, wherein the Cas9 protein is an S. pyogenes Cas9 polypeptide.

38. The pharmaceutical composition of claim 35, wherein the Cas9 protein is selected from the group consisting of esCas9, hfCas9, peCas9, and ARCas9.

39. The pharmaceutical composition of any one of claims 1-38, wherein the at least one guide RNA or a nucleic acid encoding at least one guide RNA is the at least one guide RNA.

40. The pharmaceutical composition of any one of claims 1-38, wherein the at least one guide RNA or a nucleic acid encoding at least one guide RNA is DNA encoding the at least one guide RNA.

41. The pharmaceutical composition of any one of claims 1-38, comprising a nucleic acid encoding both the RNA-guided nuclease and the at least one guide RNA.

42. The pharmaceutical composition of any one of claims 1-41, wherein the at least one guide RNA is a single guide RNA (sgRNA).

43. The pharmaceutical composition of any one of claims 1-42, wherein the at least one guide RNA targets a human gene.

44. The pharmaceutical composition of any one of claims 1-42, wherein the at least one guide RNA targets a canine gene.

45. The pharmaceutical composition of any one of claims 1-42, wherein the at least one guide RNA targets an equine gene.

46. The pharmaceutical composition of any one of claims 1-42, wherein the at least one guide RNA targets a feline gene.

47. The pharmaceutical composition of any one of claims 1-42, wherein the at least one guide RNA targets a mammalian gene.

48. The pharmaceutical composition of any one of claims 1-47, wherein the composition is formulated for parenteral administration.

49. The pharmaceutical composition of any one of claims 1-47, wherein the composition is formulated for intra-articular injection within a joint of the subject.

50. The pharmaceutical composition of any one of claims 1-47, wherein the composition is formulated for intradiscal injection.

51. The pharmaceutical composition of any one of claims 1-47, wherein the composition is formulated for peridiscal injection.

52. The pharmaceutical composition of any one of claims 1-47, wherein the composition is formulated for intravertebral injection.

53. The pharmaceutical composition of any one of claims 1-47, wherein the composition is formulated for epidural injection.

54. The pharmaceutical composition of any one of claims 1-47, wherein the composition is formulated for injection to the facet joints of the spine.

55. The pharmaceutical composition of any one of claims 1-54, wherein the one or more LNPs comprise one or more ionizable lipids selected from: 3-(didodecylamino)-N1,N1,4-tridodecyl-1-piperazineethanamine (KL10), N1-[2-(didodecylamino)ethyl]-N1,N4,N4-tridodecyl-1,4-piperazinediethanamine (KL22), 14,25-ditridecyl-15,18,21,24-tetraaza-octatriacontane (KL25), 1,2-dilinoleyloxy-N,N-dimethylaminopropane (DLin-DMA), 2,2-dilinoleyl-4-dimethylaminomethyl-[1,3]-dioxolane (DLin-K-DMA), heptatriaconta-6,9,28,31-tetraen-19-yl 4-(dimethylamino)butanoate (DLin-MC3-DMA), 2,2-dilinoleyl-4-(2-dimethylaminoethyl)-[1,3]-dioxolane (DLin-KC2-DMA), 1,2-dioleyloxy-N,N-dimethylaminopropane (DODMA), 2-({8-[(3.beta.)-cholest-5-en-3-yloxy]octyl}oxy)-N,N-dimethyl-3-[(9Z,12Z)-octadeca-9,12-dien-1-yloxy]propan-1-amine (Octyl-CLinDMA), (2R)-2-({8-[(3.beta.)-cholest-5-en-3-yloxy]octyl}oxy)-N,N-dimethyl-3-[(9Z-,12Z)-octadeca-9,12-dien-1-yloxy]propan-1-amine (Octyl-CLinDMA (2R)), (2S)-2-({8-[(3.beta.)-cholest-5-en-3-yloxy]octyl}oxy)-N,N-dimethyl-3-[(9Z-,12Z)-octadeca-9,12-dien-1-yloxy]propan-1-amine (Octyl-CLinDMA (2S)), LP01, ALC-0315, SM-102, a lipid including a cyclic amine group, and mixtures thereof.

56. The pharmaceutical composition of claim 55, wherein the ionizable lipid is DLin-KC2-DMA.

57. The pharmaceutical composition of claim 55, wherein the ionizable lipid is DLin-MC3-DMA.

58. The pharmaceutical composition of claim 55, wherein the ionizable lipid is SM-102.

59. The pharmaceutical composition of claim 55, wherein the ionizable lipid is ALC-0315.

60. The pharmaceutical composition of claim 55, wherein the ionizable lipid is LP01.

61. The pharmaceutical composition of any one of claims 1 to 54, wherein the one or more LNPs comprise one or more helper lipid selected from: 1,2-dilinoleoyl-sn-glycero-3-phosphocholine (DLPC), 1,2-dimyristoyl-sn-glycero-phosphocholine (DMPC), 1,2-dioleoyl-sn-glycero-3-phosphocholine (DOPC), 1,2-dipalmitoyl-sn-glycero-3-phosphocholine (DPPC), 1,2-distearoyl-sn-glycero-3-phosphocholine (DSPC), 1,2-diundecanoyl-sn-glycero-phosphocholine (DUPC), 1-palmitoyl-2-oleoyl-sn-glycero-3-phosphocholine (POPC), 1,2-di-O-octadecenyl-sn-glycero-3-phosphocholine (18:0 Diether PC), 1-oleoyl-2-cholesterylhemisuccinoyl-sn-glycero-3-phosphocholine (OChemsPC), 1-hexadecyl-sn-glycero-3-phosphocholine (C16 Lyso PC), 1,2-dilinolenoyl-sn-glycero-3-phosphocholine, 1,2-diarachidonoyl-sn-glycero-3-phosphocholine, 1,2-didocosahexaenoyl-sn-glycero-3-phosphocholine, 1,2-dioleoyl-sn-glycero-3-phosphoethanolamine (DOPE), 1,2-diphytanoyl-sn-glycero-3-phosphoethanolamine (ME 16.0 PE), 1,2-distearoyl-sn-glycero-3-phosphoethanolamine, 1,2-dilinoleoyl-sn-glycero-3-phosphoethanolamine, 1,2-dilinolenoyl-sn-gly cero-3-phosphoethanolamine, 1,2-diarachidonoyl-sn-glycero-3-phosphoethanolamine, 1,2-didocosahexaenoyl-sn-glycero-3-phosphoethanolamine, 1,2-dioleoyl-sn-gly cero-3-phospho-rac-(1-glycerol) sodium salt (DOPG), sphingomyelin (SM), and mixtures thereof.

62. The pharmaceutical composition of any one of claims 1 to 54, wherein the one or more LNPs comprise one or more PEG lipids selected from: PEG-modified phosphatidylethanolamines, PEG-modified phosphatidic acids, PEG-modified ceramides, PEG-modified dialkylamines, PEG-modified diacylglycerols, PEG-modified dialkylglycerols, and mixtures thereof. For example, a PEG lipid may be PEG-c-DOMG, PEG-DMG, PEG-DLPE, PEG-DMPE, PEG-DPPC, PEG-DMA or a PEG-DSPE lipid.

63. The pharmaceutical composition of any one of claims 1 to 54, wherein the one or more LNPs comprise one or more structural lipids selected from: cholesterol, fecosterol, stigmasterol, stigmastanol, sitosterol, D-sitosterol, lupeol, betulin, ursolic acid, oleanolic acid, campesterol, fucosterol, brassicasterol, ergosterol, 9, 11-dehydroergosterol, tomatidine, tomatine, α-tocopherol, and mixtures thereof.

64. The pharmaceutical composition of claim 63, wherein the structural lipid is cholesterol.

65. The pharmaceutical composition of claim 63, wherein the one or more LNPs comprise a structural lipid and a corticosteroid (e.g., prednisolone, dexamethasone, prednisone, and hydrocortisone), or a combination thereof.

66. The pharmaceutical composition of claim 65, wherein the corticosteroid is dexamethasone.

67. The pharmaceutical composition of any one of claims 1 to 66, wherein the LNPs comprise a plurality of particles with a diameter over 100 nm.

68. The pharmaceutical composition of any one of claims 1 to 66, wherein the LNPs comprise a plurality of particles with a diameter between about 60 nm and about 120 nm.

69. The pharmaceutical composition of any one of claims 1 to 68, wherein the plurality of LNPs comprise an LNP system selected from any one of LNP001 to LNP240.

70. A method for treating a disease or disorder in a subject in need thereof, the method comprising administering to the subject a pharmaceutical composition of any one of claims 1 to 69.
